(19) United States
(12) Patent Application Publication
(10) Pub. No.: US 2025/0297240 A1
(43) Pub. Date: Sep. 25, 2025

(54) BIFUNCTIONAL FUSION PROTEINS FOR UBIQUITIN-MEDIATED DEGRADATION

(71) Applicant: AXELYF EHF., HAFNARFJORDUR (IS)

(72) Inventors: HENG LI, NEW YORK, NY (US); MARIUS S. POP, NEW YORK, NY (US); ALEXANDRA SNYDER CHAREN, NEW YORK, NY (US); BENJAMIN M. STONE, NEW YORK, NY (US); CHRISTOPHER M. WILFONG, NEW YORK, NY (US); KARL DANE WITTRUP, NEW YORK, NY (US); KERRY E. BENENATO, NEW YORK, NY (US); JUWINA WIJAYA, NEW YORK, NY (US)

(21) Appl. No.: 18/863,361

(22) PCT Filed: May 4, 2023
(86) PCT No.: PCT/US2023/066619

§ 371 Date: Nov. 6, 2024

Related U.S. Application Data
(60) Provisional application No. 63/339,349, filed on May 6, 2022.

(51) Int. Cl. C12N 9/00; A61K 38/00; A61K 47/68; C07K 16/32

(52) U.S. Cl. CPC C12N 9/93; A61K 47/6851; C07K 16/32; A61K 38/00; C07K 2319/09; C12Y 603/02019

(57) ABSTRACT

Disclosed herein are polypeptides that have a portion derived from a RING family E3 ubiquitin ligase, a cullin family E3 ubiquitin ligase, a homologous to E6AP carboxyl terminus (HECT) family E3 ubiquitin ligase, and a viral homolog of an E3 ubiquitin ligase, optionally having ubiquitin-proteasome recruiting activity. Also disclosed are bifunctional polypeptides that promote proteasome-mediated degradation of a target protein. In some embodiments, the bifunctional polypeptide comprises a) a targeting moiety that is capable of binding to the target protein; and b) a ubiquitin-proteasome system recruiting domain (URD). In some embodiments, proximity of the bifunctional polypeptide to the target protein through binding of the targeting moiety induces ubiquitination of the target protein via the URD, thereby promoting proteosome-mediated degradation of the target protein. These bifunctional polypeptides may be used for the treatment of a disease in a subject, where the targeting moiety binds a target whose abnormal function and/or expression is associated with the disease.

### CROSS-REFERENCE TO RELATED APPLICATIONS

[0001] This application claims priority to U.S. Ser. No. 63/339,349, filed May 6, 2022, which is herein incorporated by reference in its entirety.

### REFERENCE TO SEQUENCE LISTING

[0002] The present application is being filed along with a Sequence Listing in electronic format. The Sequence Listing is provided as a file entitled “2023-05-04_Sequence_Listing-76BIO002WO.xml”, which was created and last modified on May 4, 2023, which is 4,931,306 bytes in size. The information in the electronic Sequence Listing is hereby incorporated by reference in its entirety.

### FIELD

[0003] Aspects of the present disclosure relate generally to bifunctional polypeptides that promote ubiquitin-mediated proteasomal degradation of desired biological targets, for example, for the treatment of a disease associated with the biological targets. Aspects of the present disclosure also relate to polypeptides comprising a portion derived from a protein selected from the group consisting of a RING family E3 ubiquitin ligase, a cullin family E3 ubiquitin ligase, a homologous to E6AP carboxyl terminus (HECT) family E3 ubiquitin ligase, and a viral homolog of an E3 ubiquitin ligase, which optionally may be used in a bifunctional polypeptide.

### BACKGROUND

[0004] Conventional therapeutics, such as small molecule and antibody inhibitors, operate by blocking or otherwise modulating the function of a therapeutic target (e.g., blocking an enzymatic or transcription promoting function). While many therapeutics belonging to this category have shown to be effective, confounding effects may arise as the therapeutic target is still present within the cellular milieu.

[0005] Molecular glues and proteolysis targeting chimeras (PROTACs) are alternative classes of therapeutics that involve small molecule compounds that recruit E3 ubiquitin ligases to a therapeutic target, thereby inducing proteolysis of the therapeutic target through the endogenous proteasomal degradation machinery. The physical degradation of the target drives a therapeutic effect through the elimination of the dysfunctional and/or disease-associated target. However, design of these small molecule degraders involves significant screening and optimizations to identify chemical modalities that are compatible for binding to both the therapeutic target and E3 ubiquitin ligase. Identification of such small molecule degraders is particularly challenging for previously undrugged intracellular targets, especially proteins that lack enzymatic domains amenable to traditional small molecule screening and optimization.

[0006] Therefore, there is a need for compounds designed to utilize a proteasomal degradation tactic, and improved approaches for identifying and/or assessing the same.

### SUMMARY OF THE DISCLOSURE

[0007] Disclosed herein are polypeptides comprising or consisting of a portion derived from a protein selected from the group consisting of a RING family E3 ubiquitin ligase, a cullin family E3 ubiquitin ligase, a homologous to E6AP carboxyl terminus (HECT) family E3 ubiquitin ligase, and a viral homolog of an E3 ubiquitin ligase. In some embodiments, the portion has ubiquitin-proteasome recruiting activity. In some embodiments, the portion is derived from a monomeric RING family E3 ubiquitin ligase.

[0008] Disclosed herein are bifunctional polypeptides that promote proteasome-mediated degradation of a target protein. In some embodiments, the bifunctional polypeptide comprises a) a targeting moiety that is capable of binding to the target protein; and b) a ubiquitin-proteasome system recruiting domain (URD). In some embodiments, proximity of the bifunctional polypeptide to the target protein through binding of the targeting moiety induces ubiquitination of the target protein via the URD, thereby promoting proteosome-mediated degradation of the target protein.

[0009] Also disclosed herein are polynucleotides encoding for any of the bifunctional polypeptides provided herein.

[0010] Also disclosed herein are pharmaceutical compositions comprising any of the bifunctional polypeptides provided herein and one or more pharmaceutically acceptable excipients, carriers, or diluents.

[0011] Also disclosed herein are methods of treating a subject. In some embodiments, the methods comprise administering any of the bifunctional polypeptides, polynucleotides, or pharmaceutical compositions provided herein to a subject in need thereof. For example, the methods may be for the treatment of a cancer or a neurodegenerative disease.

[0012] Also disclosed herein are methods of reducing the amount of a target protein in a cell. In some embodiments, the methods comprise contacting the cell with any of the bifunctional polypeptides, polynucleotides, or pharmaceutical compositions provided herein. In some embodiments, the cell is in a subject, and the bifunctional polypeptide, polynucleotide, or pharmaceutical composition is administered to the subject. In some embodiments, the cell is contacted ex vivo, and after contacting the cell with the bifunctional polypeptide, polynucleotide, or pharmaceutical composition, the cell is administered to a subject, optionally wherein the subject is also the source of the cell (e.g., in an adoptive cell therapy).

[0013] Some embodiments provided herein are described by way of the following provided numbered embodiments:
[0014] 1. A polypeptide comprising or consisting of a portion of a protein selected from the group consisting of a RING family E3 ubiquitin ligase, a cullin family E3 ubiquitin ligase, a homologous to E6AP carboxyl terminus (HECT) family E3 ubiquitin ligase, and a viral homolog of an E3 ubiquitin ligase.
[0015] 2. The polypeptide of embodiment 1, wherein the portion is derived from an E3 ubiquitin ligase selected from the group consisting of CHIP, DCAF1, E6AP, FBXW7-alpha, FBXW7-beta, Keap1, NHLRC1, RNF4, RNF6, RNF11, RNF12, RNF20, RNF25, RNF111, RNF114, RNF115, RNF125, RNF128, RNF138, RNF149, RNF152, RNF165, RNF166, RNF182, SPOP, beta-TRCP, TRIM21, TRIM32, VIF, ZNRF1, ZNRF4, and CBL-b (Y363E), optionally wherein the portion is selected from the group consisting of CBLb.1, CHIP.1, DCAF1.1, E6AP.1, FBXW7a.1, FBXW7a.2, FBXW7a.3, FBXW7a.4, FBXW7a.5, FBXW7a.6, FBXW7a.7, FBXW7a.8, FBXW7a.9, FBXW7b, FBXW7b.2, FBXW7b.3, FBXW7b.4, Keap1.1, NHLRC1.1, NHLRC1.2, NHLRC1.3, NHLRC1.4, NHLRC1.5, RNF4.1, RNF6.1, RNF6.2, RNF11.1, RNF12.1, RNF 12.2, RNF20.1, RNF25.1, RNF111.1, RNF114.1, RNF115.1, RNF125.1, RNF125.2, RNF125.3, RNF125.4, RNF125.5, RNF125.6, RNF125.7, RNF128.1, RNF138.1, RNF 149.1, RNF152.1, RNF165.1, RNF166.1, RNF182.1, RNF182.2, SPOP.1, SPOP.2, SPOP.3, bTRCP.1, TRIM21.1, TRIM21.2, TRIM21.3, TRIM32.1, VIF.1, ZNRF1.1, and ZNRF4.1.
[0016] 3. The polypeptide of any one of embodiments 1-2, wherein the portion is derived from a monomeric RING family E3 ligase.
[0017] 4. The polypeptide of any one of embodiments 1-3, wherein the portion is derived from an E3 ligase selected from the group consisting of NHLRC1, RNF11, RNF111, RNF114, RNF115, RNF 12, RNF125, RNF128, RNF 138, RNF149, RNF152, RNF165, RNF166, RNF182, RNF20, RNF25, RNF4, RNF6, ZNRF1, ZNRF4, and CBL-b (Y363E), or optionally selected from the group consisting of RNF125, NHLRC1, RNF4, RNF6, RNF12, RNF138 and ZNRF1.
[0018] 5. The polypeptide of any one of embodiments 1-4, wherein the portion is selected from the group consisting of NHLRC1.1, NHLRC1.2, NHLRC1.3, NHLRC1.4, NHLRC1.5, RNF11.1, RNF111.1, RNF114.1, RNF115.1, RNF12.1, RNF12.2, RNF 125.1, RNF125.2, RNF125.3, RNF125.4, RNF125.5, RNF125.6, RNF125.7, RNF128.1, RNF138.1, RNF149.1, RNF152.1, RNF165.1, RNF166.1, RNF182.1, RNF182.2, RNF20.1, RNF25.1, RNF4.1, RNF6.1, RNF6.2, ZNRF1.1, ZNRF4.1, and CBLb. 1, optionally selected from the group consisting of NHLRC1.1, NHLRC1.2, NHLRC1.3, NHLRC1.4, NHLRC1.5, RNF125.1, RNF125.2, RNF125.3, RNF125.4, RNF125.5, RNF125.6, RNF125.7, RNF4.1, RNF6.1, RNF6.2, RNF12.1, RNF12.2, RNF138.1, and ZNRF1.1.
[0019] 6 The polypeptide of any one of embodiments 1-2, wherein the portion is derived from a cullin family E3 ligase.
[0020] 7. The polypeptide of any one of embodiments 1-2 or 6, wherein the portion is derived from an E3 ligase selected from the group consisting of DCAF1, beta-TRCP, FBXW7-alpha, FBXW7-beta, Keap1, and SPOP, optionally selected from the group consisting of beta-TRCP, FBXW7-alpha, and FBXW7-beta.
[0021] 8 The polypeptide of any one of embodiments 1-2, or 6-7, wherein the portion is selected from the group consisting of DCAF1.1, bTRCP.1, FBXW7a.1, FBXW7a.2, FBXW7a.3, FBXW7a.4, FBXW7a.5, FBXW7a.6, FBXW7a.7, FBXW7a.8, FBXW7a.9, FBXW7b, FBXW7b.2, FBXW7b.3, FBXW7b.4, Keap1.1, SPOP.1, SPOP.2, and SPOP.3.
[0022] 9 The polypeptide of any one of embodiments 1-8, wherein the portion has ubiquitin-proteasome recruiting activity.
[0023] 10. The polypeptide of any one of embodiments 1-9, wherein the number of amino acids in the portion is, is about, or is less than, 80, 75, 70, 65, 60, 65, 50, 45, 40, 35, 30, 25, 20, 15, 10, 5, 4, 3, 2, or 1%, of the number of amino acids in the wild-type full-length protein, or a range defined by any two of the preceding values, optionally 15-80, 15-50, 25-80, 25-50, 30-60, 1-80, 2-80, 1-70, 2-70, 2-65%, optionally 15-50%, optionally 2-61%.
[0024] 11. The polypeptide of any one of embodiments 1-10, wherein the portion is, is about, is less than or equal to 370, 369, 368, 367, 366, 365, 364, 363, 362, 361, 360, 300, 250, 200, 175, 170, 165, 160, 155, 150, 145, 140, 135, 130, 129, 128, 127, 126, 125, 124, 123, 120, 115, 110, 105, 100, 95, 90, 85, 80, 75, 70, 65, 60, 55, 50, 47, 46, 45, 44, 43, 42, 41, 40, 39, 38, 37, 36, 35, 34, 33, 32, 31, 30, 25, or 20 amino acids long, or a range defined by any two of the preceding values, optionally 20-370, 20-150, 20-100, 20-80, 30-150, 30-100, 50-150, or 50-100, optionally 20-100 amino acids long, optionally 40-130 or 44-126.
[0025] 12. The polypeptide of any one of embodiments 1-11, wherein the portion comprises or consists of an amino acid sequence having at least 80%, 85%, 86%, 87%, 88%, 89%, 90%, 91%, 92%, 93%, 94%, 95%, 96%, 97%, 98%, 99%, or 100% sequence identity to any one of SEQ ID NOs: 29-43 and 1836-1895, optionally wherein the portion has ubiquitin-proteasome recruiting activity.
[0026] 13. The polypeptide of any one of embodiments 1-12, wherein the portion comprises or consists of an amino acid sequence having at least 80%, 85%, 86%, 87%, 88%, 89%, 90%, 91%, 92%, 93%, 94%, 95%, 96%, 97%, 98%, 99%, or 100% sequence identity to any one of SEQ ID NOs: 1858-1888 and 1893-1895, optionally wherein the portion has ubiquitin-proteasome recruiting activity.
[0027] 14. The polypeptide of any one of embodiments 1-12, wherein the portion comprises or consists of an amino acid sequence having at least 80%, 85%, 86%, 87%, 88%, 89%, 90%, 91%, 92%, 93%, 94%, 95%, 96%, 97%, 98%, 99%, or 100% sequence identity to any one of SEQ ID NOs: 1858-1862, 1867-1875, 1877, 1886-1888, and 1893, optionally wherein the portion has ubiquitin-proteasome recruiting activity.
[0028] 15. The polypeptide of any one of embodiments 1-12, wherein the portion consists of an amino acid sequence selected from any one of SEQ ID NOs: 1858-1862, 1867-1875, 1877, 1886-1888, and 1893.
[0029] 16. The polypeptide of any one of embodiments 1-15, wherein the portion comprises an amino acid substitution, addition, and/or deletion to the protein, optionally wherein the deletion is not an end terminal deletion or truncation of the protein.
[0030] 17. The polypeptide of any one of embodiments 1-16, wherein the polypeptide and/or the portion is a non-natural polypeptide.
[0031] 18. The polypeptide of any one of embodiments 1-17, wherein the portion is a ubiquitin-proteasome system recruiting domain (URD) that has ubiquitin-proteasome recruiting activity.
[0032] 19. A bifunctional polypeptide comprising the polypeptide of any one of embodiments 1-18, wherein the bifunctional polypeptide comprises:
   [0033] a) the portion of the protein and
   [0034] b) a targeting moiety that is capable of binding to a target protein, optionally an intracellular target protein.
[0035] 20. A bifunctional polypeptide that promotes proteasome-mediated degradation of a target protein, comprising:
   [0036] a) a targeting moiety that is capable of binding to the target protein, optionally an intracellular target protein and
   [0037] b) a ubiquitin-proteasome system recruiting domain (URD), wherein proximity of the bifunctional polypeptide to the target protein through binding of the targeting moiety induces ubiquitination of the target protein via the URD, thereby promoting proteasome-mediated degradation of the target protein.
[0038] 21. The bifunctional polypeptide of embodiment 20 comprising or consisting of the polypeptide of any one of embodiments 1-18.
[0039] 22. The bifunctional polypeptide of any one of embodiments 20-21, wherein the URD consists of the URD of embodiment 18.
[0040] 23. The bifunctional polypeptide of any one of embodiments 19-22, wherein the bifunctional polypeptide comprises one or more localization peptide sequences.
[0041] 24. The bifunctional polypeptide of embodiment 23, wherein the one or more localization peptide sequences direct the bifunctional polypeptide to a subcellular compartment or compartments, optionally wherein the subcellular compartment is the nucleus and/or the cytoplasm.
[0042] 25. The bifunctional polypeptide of embodiment 23 or 24, wherein the one or more localization peptide sequences direct the bifunctional polypeptide to a desired subcellular compartment or compartments, optionally wherein the one or more localization peptide sequences are selected or designed to direct the bifunctional polypeptide to a desired subcellular compartment or compartments.
[0043] 26 The bifunctional polypeptide of any one of embodiments 23-25, wherein the one or more localization peptide sequences comprise or consist of a nuclear localization signal (NLS) peptide and/or a nuclear export signal (NES) peptide.
[0044] 27. The bifunctional polypeptide of any one of embodiments 23-26, wherein the one or more localization peptide sequences comprise or consist of an endogenous localization peptide sequence of the targeting moiety and/or URD.
[0045] 28. The bifunctional polypeptide of any one of embodiments 23-27, wherein the one or more localization peptide sequences comprise or consist of an endogenous localization peptide sequence of the URD.
[0046] 29. The bifunctional polypeptide of any one of embodiments 19-28, wherein the URD is selected from:
   [0047] a URD derived from a protein which localizes to the cytoplasm, optionally selected from FBXW7 beta and Keap1;
   [0048] a URD derived from a protein which localizes to the nucleus, optionally selected from FBXW7 alpha, RNF165, and SPOP; and
   [0049] a URD derived from a protein which localizes to the cytoplasm and the nucleus, optionally selected from beta-TRCP, CHIP, RNF114, RNF125, RNF138, RNF166, NHLRC1, CBL-b (Y363E), TRIM21, E6AP, DCAF1 VIF, RNF11, RNF111, RNF115, RNF12, RNF128, RNF149, RNF152, RNF165, RNF182, RNF20, RNF25, RNF4, RNF6, TRIM32, ZNRF1, ZNRF4.
[0050] 30. The bifunctional polypeptide of any one of embodiments 23-29, wherein the one or more localization peptide sequences comprise or consist of an endogenous localization peptide sequence of the URD and/or targeting moiety that is modified, wherein the modification alters the subcellular compartment or compartments to which the bifunctional polypeptide is directed as compared to the native endogenous localization peptide sequence.
[0051] 31. The bifunctional polypeptide of embodiment 30, wherein the modification comprises or consists of a substitution, truncation or deletion of an endogenous localization peptide sequence.
[0052] 32. The bifunctional polypeptide of embodiment 30 or 31, wherein:
   [0053] a. the native endogenous localization peptide sequence directs the polypeptide to the nucleus, and the modified endogenous localization peptide sequence directs the polypeptide to the cytoplasm;
   [0054] b. the native endogenous localization peptide sequence directs the polypeptide to the cytoplasm, and the modified endogenous localization peptide sequence directs the polypeptide to the nucleus;
   [0055] c. the native endogenous localization peptide sequence directs the polypeptide to the nucleus and the cytoplasm, and the modified endogenous localization peptide sequence directs the polypeptide to only the cytoplasm;
   [0056] d. the native endogenous localization peptide sequence directs the polypeptide to the nucleus and the cytoplasm, and the modified endogenous localization peptide sequence directs the polypeptide to only the nucleus;
   [0057] e. the native endogenous localization peptide sequence directs the polypeptide to the nucleus, and the modified endogenous localization peptide sequence directs the polypeptide to the nucleus and the cytoplasm; or
   [0058] f. the native endogenous localization peptide sequence directs the polypeptide to the cytoplasm, and the modified endogenous localization peptide sequence directs the polypeptide to the nucleus and the cytoplasm.
[0059] 33. The bifunctional polypeptide of embodiment 30 or 31, wherein the one or more localization peptide sequences comprises or consists of an endogenous localization peptide sequence of the URD that is modified, wherein the native endogenous localization peptide sequence directs the polypeptide to the nucleus, and the modified endogenous localization peptide sequence directs the polypeptide to the cytoplasm.
[0060] 34. The bifunctional polypeptide of any one of embodiments 30-33, wherein the modified endogenous localization peptide sequence comprises or consists of a modified SPOP URD endogenous localization peptide sequence, optionally wherein the URD is SPOP.3.
[0061] 35. The bifunctional polypeptide of any one of embodiments 23-34, wherein the one or more localization peptide sequences comprise or consist of an exogenous localization peptide sequence.
[0062] 36. The bifunctional polypeptide of any one of embodiments 23-35, wherein the one or more localization peptide sequences comprise or consist of an NLS peptide that is or is a derivative of the NLS of MYC, simian virus 40 (SV40), SPOP, nucleoplasmin, 53BP1, Hrp1.
[0063] 37. The bifunctional polypeptide of any one of embodiments 23-36, wherein the one or more localization peptide sequences comprise or consist of an NLS comprising or consisting of an amino acid sequence having at least 80%, 85%, 86%, 87%, 88%, 89%, 90%, 91%, 92%, 93%, 94%, 95%, 96%, 97%, 98%, 99%, or 100% sequence identity to any one of SEQ ID NOs: 1896-1909.
[0064] 38. The bifunctional polypeptide of any one of embodiments 23-37, wherein the bifunctional polypeptide comprises or consists of two localization peptide sequences, optionally wherein the bifunctional polypeptide comprises or consists of 3, 4, or more localization peptide sequences, optionally wherein the wherein the bifunctional polypeptide comprises or consists of 2, 3, 4 or more copies of the same localization sequence in series.
[0065] 39. The bifunctional polypeptide of any one of embodiments 23-38, comprising a one or more localization peptide sequences located at a location selected from the group consisting of: the N-terminus of the bifunctional polypeptide; the C-terminus of the bifunctional polypeptide; internally within the bifunctional polypeptide; as part of the URD, optionally an endogenous portion of the URD; as a part of the targeting moiety, optionally an endogenous portion of the URD; and a combination of any of the foregoing.
[0066] 40 The bifunctional polypeptide of any one of embodiments 23-39, wherein a first localization peptide sequence is located at the N-terminus of the bifunctional polypeptide and a second localization peptide sequence is located at the C-terminus of the bifunctional polypeptide.
[0067] 41. The bifunctional polypeptide of any one of embodiments 19-40, wherein the targeting moiety is, or is less than, 260, 259, 258, 257, 256, 255, 254, 253, 252, 251, 250, 245, 240, 235, 230, 225, 220, 215, 210, 205, 200, 195, 190, 185, 180, 175, 170, 165, 160, 155, 150, 145, 140, 135, 130, 129, 128, 127, 126, 125, 124, 123, 122, 121, 120, 119, 118, 117, 116, 115, 114, 113, 112, 110, 109, 108, 107, 106, 105, 104, 103, 102, 101, 100, 99, 98, 97, 96, 95, 94, 93, 92, 91, 90, 89, 88, 87, 86, 85, 84, 83, 82, 81, 80, 75, 70, 65, 60, 55, 54, 53, 54, 53, 52, 51, 50, 49, 48, 47, 46, 45, 44, 43, 42, 41, 40, 39, 38, 37, 36, 35, 34, 33, 32, 31, 30, 29, 28, 27, 26, 25, 24, 23, 22, 21, 20, 19, 18, 17, 16, 15, 14, 13, 12, 11, or 10 amino acids long, or a range defined by any two of the preceding values, optionally 10-260, 10-200, 10-130, 25-260, 25-200, 25-130, 35-260, 35-200, 35-130, 50-260, 50-200, or 50-130 amino acids long.
[0068] 42. The bifunctional polypeptide of any one of embodiments 19-41, wherein the targeting moiety comprises or consists of an endogenous binding partner of the target protein, antibody, Fab, F(ab′)₂, Fab′, scFv, single domain antibody (sdAb), V_{H} domain, V_{L}, domain, V_{H}H, V_{NAR}, diabody, intrabody, DARPin, monobody, affibody, avimer, or any fragment or derivative thereof.
[0069] 43. The bifunctional polypeptide of any one of embodiments 19-42, wherein the targeting moiety comprises or consists of an endogenous protein binding partner of the target protein, a fragment and/or a derivative thereof.
[0070] 44 The bifunctional polypeptide of embodiment 43, wherein the targeting moiety is, or is less than, 100, 99, 98, 97, 96, 95, 94, 93, 92, 91, 90, 89, 88, 87, 86, 85, 84, 83, 82, 81, 80, 75, 70, 65, 60, 55, 54, 53, 54, 53, 52, 51, 50, 49, 48, 47, 46, 45, 44, 43, 42, 41, 40, 39, 38, 37, 36, 35, 34, 33, 32, 31, 30, 29, 28, 27, 26, 25, 24, 23, 22, 21, 20, 19, 18, 17, 16, 15, 14, 13, 12, 11, or 10 amino acids long, or a range defined by any two of the preceding values, optionally 10-100, 10-25, 14-100, 14-25, 30-100, 30-50, 30-45, or 80-100 amino acids long.
[0071] 45. The bifunctional polypeptide of embodiment 42, wherein the targeting moiety comprises or consists of a sdAb, optionally comprising or consisting of either a V_{H} domain or a V_{L} domain of an IgG antibody, or a V_{H}H, V_{H}, Or V_{NAR} domain of a heavy chain antibody (HcAb), optionally wherein the sdAb comprises or consists of a V_{H}H or V_{L} domain.
[0072] 46. The bifunctional polypeptide of embodiment 45, wherein the targeting moiety is, or is less than, 170, 165, 160, 155, 150, 145, 140, 135, 130, 129, 128, 127, 126, 125, 124, 123, 122, 121, 120, 119, 118, 117, 116, 115, 114, 113, 112, 110, 109, 108, 107, 106, 105, 104, 103, 102, 101, 100, 99, 98, 97, 96, 95, 94, 93, 92, 91, or 90, amino acids long, or a range defined by any two of the preceding values, optionally 90-150, 90-130, 110-150, 110-130, 110-125, or 114-124 amino acids long.
[0073] 47. The bifunctional polypeptide of embodiment 42, wherein the targeting moiety comprises or consists of an scFv, optionally wherein the targeting moiety is, or is less than, 260, 259, 258, 257, 256, 255, 254, 253, 252, 251, 250, 245, 240, 235, 230, 225, 220, 215, 210, 205, 200, 195, or 190 amino acids long, or a range defined by any two of the preceding values, optionally 190-260, 200-260, or 230-260 amino acids long.
[0074] 48. The bifunctional polypeptide of any one of embodiments 19-47, wherein the target protein is selected from MYC, (optionally c-MYC), beta catenin 1 (CTNNB1), forkhead box P3 (FOXP3), proliferating cell nuclear antigen (PCNA), and huntingtin (HTT), or MYC, (optionally c-MYC), CTNNB1, FOXP3, and HTT.
[0075] 49. The bifunctional polypeptide of any one of embodiments 19-48, wherein the target protein is a wild-type and/or a mutant form of the target protein, optionally wherein the targeting moiety preferentially or selectively binds the mutant form of the target protein relative to the wild-type form of the target protein.
[0076] 50. The bifunctional polypeptide of embodiment 49, wherein the mutant form of the target protein is:
   [0077] a.) CTNNB1 (SEQ ID NO: 3) comprising one or more mutations selected from: D32Y; D32N; D32V; D32G; S33Y; S33L; S33F; S33C; S33P; G34V; G34E; 135S; H36P; S37C; S37P; S37P and D207G; T41A; T41I; T42 K49del; S45F and Y670X wherein X indicates termination; S45C; S45F; S45P; S45Y; and S45del; or
   [0078] b.) HTT (SEQ ID NO: 2) comprising a polyglutamine expansion at least 36 amino acids long.
[0079] 51. The bifunctional polypeptide of any one of embodiments 48-50, wherein the targeting moiety binds, or binds at least in part, to at least a portion of:
   [0080] a) the DNA binding domain of MYC;
   [0081] b) the armadillo domain of CTNNB1;
   [0082] c) the DNA binding domain of FOXP3; or
   [0083] d) the portion of HTT that is encoded by exon 1 of the HTT gene.
[0084] 52. The bifunctional polypeptide of any one of embodiments 48-51, wherein the targeting moiety binds, or binds at least in part, to at least a portion of the target protein selected from the portion consisting of.
   [0085] a) amino acids 54-406 of MYC (SEQ ID NO: 1),
   [0086] b) amino acids 354-406 of MYC (SEQ ID NO: 1),
   [0087] c) amino acids 408-437 of MYC (SEQ ID NO: 1),
   [0088] d) amino acids 410-419 of MYC (SEQ ID NO: 1),
   [0089] e) amino acids 337-423 of FOXP3 (SEQ ID NO: 8),
   [0090] f) amino acids 284-304 of FOXP3 (SEQ ID NO: 8),
   [0091] g) amino acids 1-88 of HTT (SEQ ID NO: 2) or an analogous region in pathological forms of HTT,
   [0092] h) amino acids 1-20 of HTT (SEQ ID NO: 2),
   [0093] i) amino acids 1-17 of HTT (SEQ ID NO: 2),
   [0094] j) the poly-glutamine (polyQ) tract of HTT, optionally amino acids 18-38 of HTT (SEQ ID NO: 2) or an analogous region in pathological forms of HTT,
   [0095] k) the proline rich region (PRR) of HTT, optionally amino acids 39-76 of HTT (SEQ ID NO: 2) or an analogous region in pathological forms of HTT,
   [0096] l) amino acids 150-663 of CTNNB1 (SEQ ID NO: 3),
   [0097] m) amino acids 15-29 of CTNNB1 (SEQ ID NO: 3), and
   [0098] n) amino acids 249-265, 292-306, 379-390, 415-429, 462-470, or 505-519, or any combination thereof, of CTNNB1 (SEQ ID NO: 3).
[0099] 53. The bifunctional polypeptide any one of embodiments 48-49, wherein the targeting moiety binds, or binds at least in part, to at least a portion of the target protein selected from the portion consisting of amino acids 38-48, 123-129, or 251-257 or any combination thereof, of PCNA (SEQ ID NO: 3239).
[0100] 54. The bifunctional polypeptide of any one of embodiments 19-53, wherein the targeting moiety is selected from Omomyc, FOXP3 DNA binding domain (FOXP3DBD), FOXP3, VL12.3, INT41, TCF4, TCF4.1, TCF4.2, TCF4.3, TCF4.4, TCF4.5, TCF4.6, TCF4.7, TCF4.8, TCF4.9, TCF4.10, TCF4.11, TCF4.12, TCF4.13, TCF4.14, TCF4.15, TCF4.16, con1, con1.1, con1.2, p21, p21.1, p21.2, p21.3, p21.4, p21.5, p21.6, p21.7, p21.8, p21.9, mycV.0300, mycV.1300, mycV.1500, mycV.3700, mycV.6600, mycV.1516, mycV.1515, mycV.1514, mycV.1513, mycV.1512, mycV.1511, mycV.1510, mycV.1509, mycV.1508, mycV.1507, mycV.1506, mycV.1505, mycV.1504, myeV.1503, mycV.1502, mycV.1501, or a fragment thereof that is capable of binding to the target protein, optionally wherein the targeting moiety does not comprise full length or unmodified con1 or p21.
[0101] 55. The bifunctional polypeptide of any one of embodiments any one of embodiments 19-54, wherein the targeting moiety comprises or consists of an amino acid sequence having at least 80%, 85%, 86%, 87%, 88%, 89%, 90%, 91%, 92%, 93%, 94%, 95%, 96%, 97%, 98%, 99%, or 100% sequence identity to any one of SEQ ID NOs: 6-12, 1918, 1926, 1934, 1942, 1950, 1958, 1966, 1974, 1982, 1990, 1998, 2006, 2014, 2022, 2030, 2038, 2046, 2054, 2062, 2070, 2078, 2086, 2087, 2095 and 2111-2137.
[0102] 56. The bifunctional polypeptide of any one of embodiments 48-55, wherein the bifunctional polypeptide comprises or consists of an amino acid sequence having at least 80%, 85%, 86%, 87%, 88%, 89%, 90%, 91%, 92%, 93%, 94%, 95%, 96%, 97%, 98%, 99%, or 100% sequence identity to any one of SEQ ID NOs: 2177-2328 and 2331-3238, optionally wherein the sequence lacks the HA tag sequence (SEQ ID NO: 50).
[0103] 57. The bifunctional polypeptide of any one of embodiments 48-55, wherein the bifunctional polypeptide comprises or consists of an amino acid sequence having at least 80%, 85%, 86%, 87%, 88%, 89%, 90%, 91%, 92%, 93%, 94%, 95%, 96%, 97%, 98%, 99%, or 100% sequence identity to any one of the SEQ ID NOs in Tables disclosing Grade A (Tables 7, 11, 17 and 23), Grade B (Tables 8, 12, 14, 18, 20, and 24), and/or Grades C and D (Tables 9, 13, 15, 21 and 25), optionally excluding any one of the SEQ ID NOs having a Grade of D, optionally wherein the sequence lacks the HA tag sequence (SEQ ID NO: 50).
[0104] 58. The bifunctional polypeptide of any one of embodiments 48-55, wherein the bifunctional polypeptide comprises or consists of an amino acid sequence of any one of the SEQ ID NOs in Tables disclosing Grade A (Tables 7, 11, 17 and 23) and/or Grade B (Tables 8, 12, 14, 18, 20, and 24), optionally wherein the sequence lacks the HA tag sequence (SEQ ID NO: 50).
[0105] 59. The bifunctional polypeptide of any one of embodiments 48-58, wherein the bifunctional polypeptide does not comprise or consist of an amino acid sequence of any one of the SEQ ID NOs in Tables disclosing Grades C and D (Tables 9, 13, 15, 21 and 25) having a Grade of C and/or D, optionally wherein the sequence lacks the HA tag sequence (SEQ ID NO: 50).
[0106] 60. The bifunctional polypeptide of any one of embodiments 19-59, wherein the target protein is CTNNB1.
[0107] 61. The bifunctional polypeptide of embodiment 60, wherein the CTNNB1 protein is a mutant form of CTNNB1 (SEQ ID NO: 3) comprising one or more mutations selected from: D32Y; D32N; D32V; D32G; S33Y; S33L; S33F; S33C; S33P; G34V; G34E; 135S; H36P; S37C; S37P; S37P and D207G; T41A; T411; T42_K49del; S4SF and Y670X wherein X indicates termination; S45C; S45F: S45P; S45Y; and S45del.
[0108] 62. The bifunctional polypeptide of any one of embodiments embodiment 60-61, wherein the bifunctional polypeptide comprises a localization peptide sequence which directs the bifunctional polypeptide to the nucleus of a cell, optionally wherein the localization peptide sequence comprises or consists of a NLS sequence selected from the group of the NLS sequences of MYC, SPOP, Hrp1, SV40, 53BP1, and nucleoplasmin, optionally wherein the localization peptide sequence comprises or consists of a NLS sequence selected from the group of the NLS sequence of MYC, SPOP, and Hrp1.
[0109] 63. The bifunctional polypeptide of embodiment 62, wherein the NLS comprises or consists of a sequence selected from any one of SEQ ID NOs: 1896-1904, optionally wherein the NLS comprises or consists of a sequence selected from any one of SEQ ID NOs: 1896-1898, 1902 and 1904.
[0110] 64. The bifunctional polypeptide of any one of embodiments 60-63, wherein the URD is derived from a URD selected from the group consisting of CBL-b (Y363E), CHIP, DCAF1, E6AP, FBXW7-alpha, Keap1, NHLRC1, RNF4, RNF12, RNF114, RNF125, RNF138, RNF166, SPOP, beta-TRCP, TRIM21, and, VIF, optionally wherein the URD is a truncation or fragment thereof that retains ubiquitin-proteasome recruiting activity, optionally wherein the URD is derived from NHLRC1, RNF125, or SPOP, optionally wherein the URD is truncation or fragment thereof that retains ubiquitin-proteasome recruiting activity.
[0111] 65. The bifunctional polypeptide of embodiment 64, wherein the URD comprises or consists of a sequence selected from any one of SEQ ID NOs: 1836-1848, 1853-1862, 1865, 1867-1875, 1877, 1881, 1889-1891, and 1895, optionally wherein the URD comprises or consists of a sequence selected from any one of SEQ ID NOs: 1858-1862, 1869-1875, and 1854-1856.
[0112] 66 The bifunctional polypeptide of any one of embodiments 60-65, wherein the URD comprises or consists of CBLb. 1, CHIP.1, DCAF1.1, E6AP.1, FBXW7a.1, Keap1.1, NHLRC1.1, NHLRC1.2, NHLRC1.3, RNF4.1, RNF12.2, RNF114.1, RNF125.1, RNF 125.2, RNF138.1, RNF166.1, SPOP.1, bTRCP 1, TRIM21.1, or VIF.1, optionally wherein the URD comprises or consists of NHLRC1.1, NHLRC1.2, NHLRC1.3, RNF125.1, RNF125.2, or SPOP.1.
[0113] 67. The bifunctional polypeptide of embodiment 66, wherein the URD comprises or consists of a sequence selected from any one of SEQ ID NOs: 1836-1840, 1853-1854, 1857, 1858-1860, 1865, 1868-1870, 1877, 1881, 1886, 1889, and 1895, optionally wherein the URD comprises or consists of a sequence selected from any one of SEQ ID NOs: 1854, 1858-1860, and 1869-1870.
[0114] 68. The bifunctional polypeptide of any one of embodiments 60-67, wherein the targeting moiety binds, or binds at least in part, to at least a portion of:
   [0115] a) the armadillo domain of CTNNB1,
   [0116] b) amino acids 150-663 of CTNNB1 (SEQ ID NO: 3),
   [0117] c) amino acids 15-29 of CTNNB1 (SEQ ID NO: 3), and
   [0118] d) amino acids 249-265, 292-306, 379-390, 415-429, 462-470, or 505-519, or any combination thereof, of CTNNB1 (SEQ ID NO: 3).
[0119] 69. The bifunctional polypeptide of any one of embodiments 60-68, wherein the targeting moiety comprises or consists of an endogenous protein binding partner of the target protein, a fragment and/or a derivative thereof.
[0120] 70 The bifunctional polypeptide of any one of embodiments 60-69, wherein the targeting moiety comprises or consists of TCF4.1, TCF4.2, TCF4.3, TCF4.4, TCF4.5, TCF4.6, TCF4.7, TCF4.8, TCF4.9, TCF4.10, TCF4.11, TCF4.12, TCF4.13, TCF4.14, TCF4.15, or TCF4.16, or a fragment thereof that is capable of binding to the target protein.
[0121] 71. The bifunctional polypeptide of any one of embodiments 60-70, wherein the targeting moiety comprises or consists of an amino acid sequence having at least 80%, 85%, 86%, 87%, 88%, 89%, 90%, 91%, 92%, 93%, 94%, 95%, 96%, 97%, 98%, 99%, or 100% sequence identity to any one of SEQ ID NOs: 2112-2126.
[0122] 72. The bifunctional polypeptide of any one of embodiments 60-71, wherein the bifunctional polypeptide comprises or consists of an amino acid sequence having at least 80%, 85%, 86%, 87%, 88%, 89%, 90%, 91%, 92%, 93%, 94%, 95%, 96%, 97%, 98%, 99%, or 100% sequence identity to any one of SEQ ID NOs: 2177-2328, and 2331-2475, optionally wherein the sequence lacks the HA tag sequence (SEQ ID NO: 50).
[0123] 73. The bifunctional polypeptide of any one of embodiments 60-71, wherein the bifunctional polypeptide comprises or consists of an amino acid sequence having at least 80%, 85%, 86%, 87%, 88%, 89%, 90%, 91%, 92%, 93%, 94%, 95%, 96%, 97%, 98%, 99%, or 100% sequence identity to any one of the SEQ ID NOs in Table 7, 8 and/or 9, optionally excluding any one of the SEQ ID NOs having a Grade of D, optionally wherein the sequence lacks the HA tag sequence (SEQ ID NO: 50).
[0124] 74. The bifunctional polypeptide of any one of embodiments 60-71, wherein the bifunctional polypeptide comprises or consists of an amino acid sequence of any one of the SEQ ID NOs in Table 7 and/or 8, optionally wherein the sequence lacks the HA tag sequence (SEQ ID NO: 50).
[0125] 75 The bifunctional polypeptide of any one of embodiments 60-74, wherein the bifunctional polypeptide does not comprise or consist of an amino acid sequence of any one of the SEQ ID NOs in Table 9 having a Grade of C and/or D, optionally wherein the sequence lacks the HA tag sequence (SEQ ID NO: 50).
[0126] 76. The bifunctional polypeptide of any one of embodiments 60-75, wherein the URD is not derived from beta-TRCP, optionally wherein the URD does not comprise or consist of bTRCP.1, optionally wherein the URD does not comprise or consist of SEQ ID NOs: 1839.
[0127] 77. A polynucleotide encoding a bifunctional polypeptide comprising or consisting of the bifunctional polypeptide of any one of embodiments 60-76.
[0128] 78. The polynucleotide of embodiment 77, wherein the polynucleotide comprises or consists of a nucleic acid sequence having at least 80%, 85%, 86%, 87%, 88%, 89%, 90%, 91%, 92%, 93%, 94%, 95%, 96%, 97%, 98%, 99%, or 100% sequence identity to any one of SEQ ID NOs: 3207-3232.
[0129] 79. The bifunctional polypeptide of any one of embodiments 19-59, wherein the target protein is MYC.
[0130] 80. The bifunctional polypeptide of embodiment 79, wherein the bifunctional polypeptide comprises a localization peptide sequence which directs the bifunctional polypeptide to the nucleus of a cell, optionally wherein the localization peptide sequence comprises or consists of the NLS sequence selected from the group of the NLS sequences of MYC, SPOP, Hrp1, SV40, and nucleoplasmin, optionally wherein the localization peptide sequence comprises or consists of a NLS sequence selected from the group of the NLS sequence of SPOP, MYC, and Hrp1.
[0131] 81. The bifunctional polypeptide of embodiment 80, wherein the NLS comprises or consists of a sequence selected from any one of SEQ ID NOs: 1896-1898 and 1900-1904, optionally wherein the NLS comprises or consists of a sequence selected from any one of SEQ ID NOs: 1896-1898, 1902 and 1904.
[0132] 82. The bifunctional polypeptide of any one of embodiments 79-81, wherein the URD is derived from a URD selected from the group consisting of CBL-b (Y363E), CHIP, DCAF1, E6AP, FBXW7-alpha, Keap1, NHLRC1, RNF4, RNF6, RNF11, RNF12, RNF20, RNF25, RNF111, RNF115, RNF125, RNF128, RNF149, RNF152, RNF165, RNF182, SPOP, TRIM21, TRIM32, VIF, ZNRF1, and ZNRF4, optionally wherein the URD is a truncation or fragment thereof that retains ubiquitin-proteasome recruiting activity, optionally wherein the URD is derived from NHLRC1, RNF4, RNF12, RNF182, SPOP or ZNRF1, optionally wherein the URD is a truncation or fragment thereof that retains ubiquitin-proteasome recruiting activity.
[0133] 83. The bifunctional polypeptide of embodiment 82, wherein the URD comprises or consists of a sequence selected from any one of SEQ ID NOs: 1836-1838, 1840-1848, 1853-18-64, 1866-1876, 1878-1880, 1882-1895, optionally wherein the URD comprises or consists of a sequence selected from any one of SEQ ID NOs: 1854-1856, 1858-1862, 1867, 1868, 1882, 1883, 1886, and 1893
[0134] 84. The bifunctional polypeptide of any one of embodiments 79-83, wherein the URD comprises or consists of CBLb. 1, CHIP 1, DCAF1.1, E6AP.1, FBXW7a 1, Keap1.1, NHLRC1.1, NHLRC1.4, NHLRC1.5, RNF4.1, RNF6.1, RNF6.2, RNF11.1, RNF12.1, RNF12.2, RNF20.1, RNF25.1, RNF111.1, RNF115.1, RNF 125.1, RNF 125.2, RNF125.7, RNF128.1, RNF149.1, RNF152.1, RNF165.1, RNF182.1, RNF182.2, SPOP.1, SPOP.2, TRIM21.2, TRIM21.3, TRIM32.1, VIF. 1, ZNRF1.1, ZNRF4.1, optionally wherein the URD comprises or consists of NHLRC1.1, NHLRC1.4, NHLRC1.5, RNF4.1, RNF12.1, RNF12.2, RNF182.1, RNF182.2, SPOP.1, SPOP.2, or ZNRF1.1.
[0135] 85. The bifunctional polypeptide of embodiment 84, wherein the URD comprises or consists of a sequence selected from any one of SEQ ID NOs: 1836-1838, 1840, 1853-1855, 1857, 1858, 1861-1864, 1866-1870, 1875, 1876, 1878-1880, 1882-1888, and 1890-1895, optionally wherein the URD comprises or consists of a sequence selected from any one of SEQ ID NOs: 1854, 1855, 1858, 1861, 1862, 1867, 1868, 1882, 1883, 1886, and 1893.
[0136] 86. The bifunctional polypeptide of any one of embodiments 79-85, wherein the targeting moiety binds, or binds at least in part, to at least a portion of:
   [0137] a.) the DNA binding domain of MYC;
   [0138] b.) amino acids 54-406 of MYC (SEQ ID NO: 1);
   [0139] c.) amino acids 354-406 of MYC (SEQ ID NO: 1),
   [0140] d.) amino acids 408-437 of MYC (SEQ ID NO: 1); and
   [0141] e.) amino acids 410-419 of MYC (SEQ ID NO: 1)
[0142] 87. The bifunctional polypeptide of any one of embodiments 79-86, wherein the targeting moiety comprises or consists of an endogenous protein binding partner of the target protein, a fragment and/or a derivative thereof.
[0143] 88. The bifunctional polypeptide of any one of embodiments 79-87, wherein the targeting moiety comprises or consists of Omomyc, or a fragment thereof that is capable of binding to the target protein.
[0144] 89. The bifunctional polypeptide of any one of embodiments 79-88, wherein the targeting moiety comprises or consists of an amino acid sequence having at least 80%, 85%, 86%, 87%, 88%, 89%, 90%, 91%, 92%, 93%, 94%, 95%, 96%, 97%, 98%, 99%, or 100% sequence identity to SEQ ID NO: 2086.
[0145] 90 The bifunctional polypeptide of any one of embodiments 79-89, wherein the bifunctional polypeptide comprises or consists of an amino acid sequence having at least 80%, 85%, 86%, 87%, 88%, 89%, 90%, 91%, 92%, 93%, 94%, 95%, 96%, 97%, 98%, 99%, or 100% sequence identity to any one of SEQ ID NOs: 2747-2794, optionally wherein the sequence lacks the HA tag sequence (SEQ ID NO: 50).
[0146] 91. The bifunctional polypeptide of any one of embodiments 79-89, wherein the bifunctional polypeptide comprises or consists of an amino acid sequence having at least 80%, 85%, 86%, 87%, 88%, 89%, 90%, 91%, 92%, 93%, 94%, 95%, 96%, 97%, 98%, 99%, or 100% sequence identity to any one of the SEQ ID NOs in Table 14 and/or 15, optionally excluding any one of the SEQ ID NOs having a Grade of D, optionally wherein the sequence lacks the HA tag sequence (SEQ ID NO: 50).
[0147] 92. The bifunctional polypeptide of any one of embodiments 79-89, wherein the bifunctional polypeptide comprises or consists of an amino acid sequence of any one of the SEQ ID NOs in Table 14, optionally wherein the sequence lacks the HA tag sequence (SEQ ID NO: 50).
[0148] 93. The bifunctional polypeptide of any one of embodiments 79-92, wherein the bifunctional polypeptide does not comprise or consist of an amino acid sequence of any one of the SEQ ID NOs in Tables 15 having a Grade of C and/or D, optionally wherein the sequence lacks the HA tag sequence (SEQ ID NO: 50).
[0149] 94. The bifunctional polypeptide of any one of embodiments 79-86, wherein the targeting moiety comprises or consists of a sdAb, optionally comprising or consisting of either a V_{H} domain or a V_{L} domain of an IgG antibody, or a V_{H}H, V_{H}, or V_{NAR} domain of a heavy chain antibody (HcAb), optionally wherein the sdAb comprises or consists of a V_{H}H domain.
[0150] 95. The bifunctional polypeptide of embodiment 94, wherein the targeting moiety comprises or consists of a sdAb, optionally a V_{H}H domain, comprising a CDR1 selected from any one of SEQ ID NOs: 1920, 1928, 1944, and 1952, a CDR2 selected from any one of SEQ ID NOs: 1922, 1930, 1938, and 1946, and a CDR3 selected from any one of SEQ ID NOs: 1924, 1932, 1940, 1948, and 1956; optionally wherein the combination of CDR1, CDR2, and CDR3 is selected from one of the following combinations:
   [0151] a.) SEQ ID NOs: 1920, 1922, and 1924;
   [0152] b.) SEQ ID NOs: 1928, 1930, and 1932;
   [0153] c.) SEQ ID NOs: 1936, 1938 and 1940;
   [0154] d.) SEQ ID NOs: 1944, 1946 and 1948; and
   [0155] e.) SEQ ID NOs: 1952, 1954 and 1956; optionally wherein each CDR sequence independently comprises 1, 2, 3, 4, 5, 6, 7, or more substitutions and/or 1, 2, 3, 4, 5, 6, 7, or more deletions or additions, and/or has at least 90%, 91%, 92%, 93%, 94%, 95%, 96%, 97%, 98%, 99%, or 100% sequence identity to a sequence selected from any one of SEQ ID NOs: 1920, 1928, 1944, 1952, 1922, 1930, 1938, 1946, 1924, 1932, 1940, 1948, and 1956.
[0156] 96. The bifunctional polypeptide of embodiment 95, wherein the sdAb, optionally a VAH domain, comprises a V_{H} FR1 selected from any one of SEQ ID NOs: 1919 and 1951, a V_{H} FR2 of SEQ ID NO: 1921, a V_{H} FR3 selected from any one of SEQ ID NOs: 1923, 1939, and 1955, and a V_{H} FR4 selected from any one of SEQ ID NOs: 1925 and 1933, optionally wherein the combination of CDR1, CDR2, and CDR3 is selected from one of the following combinations:
   [0157] a.) SEQ ID NOs: 1919, 1921, 1923, and 1925;
   [0158] b.) SEQ ID NOs: 1927, 1929, 1931, and 1933;
   [0159] c.) SEQ ID NOs: 1935, 1937, 1939, and 1941; and
   [0160] d.) SEQ ID NOs: 1951, 1953, 1955, and 1957; optionally wherein each V_{H} framework region comprises 1, 2, 3, 4, 5, 6, 7, 8, 9, 10, 11, 12, 13, 14, 15, 16, 17 or more substitutions and/or 1, 2, 3, 4, 5, 6, 7, 8, 9, 10, 11, 12, 13, 14, 15, 16, 17 or more deletions or additions, and/or has at least 90%, 91%, 92%, 93%, 94%, 95%, 96%, 97%, 98%, 99%, or 100% sequence identity to a sequence selected from any one of SEQ ID NOs: 1919, 1951, 1921, 1923, 1939, 1955, 1925, and 1933.
[0161] 97. The bifunctional polypeptide of any one of embodiments 94-96, wherein the targeting moiety comprises or consists of a sdAb, optionally a V_{H}H domain, sequence selected from any one of SEQ ID NOs: 1918, 1926, 1934, 1942, 1950, 1958, 1966, 1974, 1982, 1990, 1998, 2006, 2014, 2022, 2030, 2038, 2046, 2054, 2062, 2070, and 2078, optionally wherein each CDR sequence independently comprises 1, 2, 3, 4, 5, 6, 7, or more substitutions and/or 1, 2, 3, 4, 5, 6, 7, or more deletions or additions, and/or has at least 90%, 91%, 92%, 93%, 94%, 95%, 96%, 97%, 98%, 99%, or 100% sequence identity to a CDR sequence of any one of SEQ ID NOs: 1918, 1926, 1934, 1942, 1950, 1958, 1966, 1974, 1982, 1990, 1998, 2006, 2014, 2022, 2030, 2038, 2046, 2054, 2062, 2070, and 2078, and/or wherein the framework region comprises 1, 2, 3, 4, 5, 6, 7, 8, 9, 10, 11, 12, 13, 14, 15, 16, 17 or more substitutions and/or 1, 2, 3, 4, 5, 6, 7, 8, 9, 10, 11, 12, 13, 14, 15, 16, 17 or more deletions or additions, and/or has at least 90%, 91%, 92%, 93%, 94%, 95%, 96%, 97%, 98%, 99%, or 100% sequence identity to the framework region of any one of SEQ ID NOs: 1918, 1926, 1934, 1942, 1950, 1958, 1966, 1974, 1982, 1990, 1998, 2006, 2014, 2022, 2030, 2038, 2046, 2054, 2062, 2070, and 2078.
[0162] 98. The bifunctional polypeptide of any one of embodiments 94-97, wherein the bifunctional polypeptide comprises or consists of an amino acid sequence having at least 80%, 85%, 86%, 87%, 88%, 89%, 90%, 91%, 92%, 93%, 94%, 95%, 96%, 97%, 98%, 99%, or 100% sequence identity to any one of SEQ ID NOs: 2795-3107, and 3238, optionally wherein the sequence lacks the HA tag sequence (SEQ ID NO: 50).
[0163] 99. The bifunctional polypeptide of any one of embodiments 94-97, wherein the bifunctional polypeptide comprises or consists of an amino acid sequence having at least 80%, 85%, 86%, 87%, 88%, 89%, 90%, 91%, 92%, 93%, 94%, 95%, 96%, 97%, 98%, 99%, or 100% sequence identity to any one of the SEQ ID NOs in Table 11, 12 and/or 13, optionally excluding any one of the SEQ ID NOs having a Grade of D, optionally wherein the sequence lacks the HA tag sequence (SEQ ID NO. 50)
[0164] 100. The bifunctional polypeptide of any one of embodiments 94-97, wherein the bifunctional polypeptide comprises or consists of an amino acid sequence of any one of the SEQ ID NOs in Table 11 and/or 12, optionally wherein the sequence lacks the HA tag sequence (SEQ ID NO: 50).
[0165] 101. The bifunctional polypeptide of any one of embodiments 94-100, wherein the bifunctional polypeptide does not comprise or consist of an amino acid sequence of any one of the SEQ ID NOs in Tables 13 having a Grade of C and/or D, optionally wherein the sequence lacks the HA tag sequence (SEQ ID NO: 50).
[0166] 102. The bifunctional polypeptide of any one of embodiments 79-101, wherein the URD is not derived from CHIP, optionally wherein the URD does not comprise or consist of CHIP. 1, optionally wherein the URD does not comprise or consist of SEQ ID NO. 1836.
[0167] 103. A polynucleotide encoding a bifunctional polypeptide comprising or consisting of the bifunctional polypeptide of any one of embodiments 79-102.
[0168] 104. The polynucleotide of embodiment 103, wherein the polynucleotide comprises or consists of a nucleic acid sequence having at least 80%, 85%, 86%, 87%, 88%, 89%, 90%, 91%, 92%, 93%, 94%, 95%, 96%, 97%, 98%, 99%, or 100% sequence identity to any one of SEQ ID NOs: 3233-3235.
[0169] 105. The bifunctional polypeptide of any one of embodiments 19-59, wherein the target protein is PCNA.
[0170] 106. The bifunctional polypeptide of embodiment 105, wherein the bifunctional polypeptide comprises a localization peptide sequence which directs the bifunctional polypeptide to the nucleus of a cell, optionally wherein the localization peptide sequence comprises or consists of a NLS sequence selected from the group of the NLS sequences of MYC, Hrp1, SV40, 53BP1, and nucleoplasmin, optionally wherein the localization peptide sequence comprises or consists of a NLS sequence selected from the group of the NLS sequence of MYC and nucleoplasmin.
[0171] 107. The bifunctional polypeptide of embodiment 106, wherein the NLS comprises or consists of a sequence selected from any one of SEQ ID NOs: 1898-1904, optionally wherein the NLS comprises or consists of a sequence selected from any one of SEQ ID NOs: 1900, 1902 and 1904.
[0172] 108. The bifunctional polypeptide of any one of embodiments 105-107, wherein the URD is derived from a URD selected from the group consisting of CBL-b (Y363E), CHIP, DCAF1, E6AP, FBXW7-alpha, KEAP1, NHLRC1, RNF4, RNF6, RNF12, RNF25, RNF114, RNF125, RNF138, RNF166, SPOP, TRIM21, and VIF, optionally wherein the URD is a truncation or fragment thereof that retains ubiquitin-proteasome recruiting activity, optionally wherein the URD is derived from SPOP, NHLRC1, RNF4, RNF12, or RNF125, optionally wherein the URD is truncation or fragment thereof that retains ubiquitin-proteasome recruiting activity.
[0173] 109. The bifunctional polypeptide of embodiment 108, wherein the URD comprises or consists of a sequence selected from any one of SEQ ID NOs: 1836-1838, 1840-1848, 1853-1862, 1865, 1867-1875, 1877, 1881, 1885-1887, 1889-1891, and 1895, optionally wherein the URD comprises or consists of a sequence selected from any one of SEQ ID NOs: 1854-1856, 1858-1862, 1867-1875, and 1886.
[0174] 110. The bifunctional polypeptide of any one of embodiments 105-109, wherein the URD comprises or consists of CBLb.1, CHIP.1, DCAF1.1, E6AP.1, FBXW7a.1, KEAP1.1, NHLRC1.1, RNF4.1, RNF6.2, RNF 12.2, RNF25.1, RNF114.1, RNF125.2, RNF138.1, RNF166.1, SPOP.2, SPOP.3, TRIM21.2, or VIF.1, optionally wherein the URD comprises or consists of NHLRC1.1, RNF4.1, RNF12.2, RNF25.1, SPOP.2, or SPOP.3.
[0175] 111. The bifunctional polypeptide of embodiment 110, wherein the URD comprises or consists of a sequence selected from any one of SEQ ID NOs: 1836-1838, 1840, 1853, 1855-1858, 1865, 1868, 1870, 1877, 1881, 1885, 1886, 1888, 1890, and 1895, optionally wherein the URD comprises or consists of a sequence selected from any one of SEQ ID NOs: 1855, 1856, 1858, 1868, 1885, and 1886.
[0176] 112. The bifunctional polypeptide of any one of embodiments 105-111, wherein the targeting moiety binds, or binds at least in part, to at least a portion of amino acids 38-48, 123-129, or 251-257 or any combination thereof, of PCNA (SEQ ID NO: 3239):
[0177] 113. The bifunctional polypeptide of any one of embodiments 105-112, wherein the targeting moiety comprises or consists of an endogenous protein binding partner of the target protein, a fragment and/or a derivative thereof.
[0178] 114. The bifunctional polypeptide of any one of embodiments 105-113, wherein the targeting moiety comprises or consists of con1, con1.1, con1.2, p21, p21.1, p21.2, p21.3, p21.4, p21.5, p21.6, p21.7, p21.8, p21.9, or a fragment thereof that is capable of binding to the target protein, optionally wherein the targeting moiety does not comprise full length or unmodified con1 or p21.
[0179] 115. The bifunctional polypeptide of any one of embodiment 105-114, wherein the targeting moiety comprises or consists of an amino acid sequence having at least 80%, 85%, 86%, 87%, 88%, 89%, 90%, 91%, 92%, 93%, 94%, 95%, 96%, 97%, 98%, 99%, or 100% sequence identity to any one of SEQ ID NOs: 2127-2137.
[0180] 116. The bifunctional polypeptide of any one of embodiment 105-115, wherein the bifunctional polypeptide comprises or consists of an amino acid sequence having at least 80%, 85%, 86%, 87%, 88%, 89%, 90%, 91%, 92%, 93%, 94%, 95%, 96%, 97%, 98%, 99%, or 100% sequence identity to any one of SEQ ID NOs: 3108-3206, optionally wherein the sequence lacks the HA tag sequence (SEQ ID NO: 50).
[0181] 117. The bifunctional polypeptide of any one of embodiments 105-115, wherein the bifunctional polypeptide comprises or consists of an amino acid sequence having at least 80%, 85%, 86%, 87%, 88%, 89%, 90%, 91%, 92%, 93%, 94%, 95%, 96%, 97%, 98%, 99%, or 100% sequence identity to any one of the SEQ ID NOs in Table 17 and/or 18, optionally wherein the sequence lacks the HA tag sequence (SEQ ID NO: 50).
[0182] 118. The bifunctional polypeptide of any one of embodiments 105-115, wherein the bifunctional polypeptide comprises or consists of an amino acid sequence of any one of the SEQ ID NOs in Table 17 and/or 18, optionally wherein the sequence lacks the HA tag sequence (SEQ ID NO: 50).
[0183] 119. The bifunctional polypeptide of any one of embodiments 105-118, wherein the URD is not derived from SPOP, optionally wherein the URD does not comprise or consist of SPOP.1, SPOP.2, or SPOP.3, optionally wherein the URD does not comprise or consist of a sequence selected from any one of SEQ ID NOs: 1854-1856.
[0184] 120. A polynucleotide encoding a bifunctional polypeptide comprising or consisting of the bifunctional polypeptide of any one of embodiments 105-119.
[0185] 121. The bifunctional polypeptide of any one of embodiments 19-59, wherein the target protein is FOXP3.
[0186] 122. The bifunctional polypeptide of embodiment 121, wherein the bifunctional polypeptide comprises a localization peptide sequence which directs the bifunctional polypeptide to the nucleus, optionally wherein the localization peptide sequence comprises or consists of the NLS sequence of MYC, optionally wherein the NLS comprises or consists of SEQ ID NOs: 1902 or 1904.
[0187] 123. The bifunctional polypeptide of embodiment 121 or 122, wherein the URD is derived from a URD selected from the group consisting of CHIP, DCAF1, E6AP, FBXW7-alpha, Keap1, RNF125, SPOP, and VIF, optionally wherein the URD is a truncation or fragment thereof that retains ubiquitin-proteasome recruiting activity, optionally wherein the URD is derived from E6AP, RNF125, SPOP, or VIF, optionally wherein the URD is truncation or fragment thereof that retains ubiquitin-proteasome recruiting activity.
[0188] 124. The bifunctional polypeptide of embodiment 123, wherein the URD comprises or consists of a sequence selected from any one of SEQ ID NOs: 1836-1838, 1840-1848, 1853-1857, and 1869-1875, optionally wherein the URD comprises or consists of a sequence selected from any one of SEQ ID NOs: 1838, 1854, 1855, 1856, 1857, 1869, 1870, 1871, 1872, 1873, 1874, 1875, and 1876.
[0189] 125. The bifunctional polypeptide of any one of embodiments 121-124, wherein the URD comprises or consists of CHIP.1, DCAF1.1, E6AP.1, FBXW7a.1, Keap1.1, RNF125.1, SPOP.1, VIF.1, optionally wherein the URD comprises or consists of E6AP. 1, RNF 125.1, SPOP.1, or VIF.1.
[0190] 126. The bifunctional polypeptide of embodiment 125, wherein the URD comprises or consists of a sequence selected from any one of SEQ ID NOs: 1836-1838, 1840, 1853, 1854, 1857, and 1869, optionally wherein the URD comprises or consists of a sequence selected from any one of SEQ ID NOs: 1838, 1854, 1857, 1869.
[0191] 127. The bifunctional polypeptide of any one of embodiments 121-126, wherein the targeting moiety binds, or binds at least in part, to at least a portion of:
   [0192] a) the DNA binding domain of FOXP3, or
   [0193] b) amino acids 337-423 of FOXP3 (SEQ ID NO: 8).
[0194] 128. The bifunctional polypeptide of any one of embodiments 121-127, wherein the targeting moiety comprises or consists of an endogenous protein binding partner of the target protein, a fragment and/or a derivative thereof.
[0195] 129. The bifunctional polypeptide of any one of embodiments 121-128, wherein the targeting moiety comprises or consists of FOXP3, FOXP3DBD, or a fragment thereof that is capable of binding to the target protein.
[0196] 130. The bifunctional polypeptide of any one of embodiment 121-129, wherein the targeting moiety comprises or consists of an amino acid sequence having at least 80%, 85%, 86%, 87%, 88%, 89%, 90%, 91%, 92%, 93%, 94%, 95%, 96%, 97%, 98%, 99%, or 100% sequence identity to SEQ ID NO: 2111.
[0197] 131. The bifunctional polypeptide of any one of embodiment 121-130, wherein the bifunctional polypeptide comprises or consists of an amino acid sequence having at least 80%, 85%, 86%, 87%, 88%, 89%, 90%, 91%, 92%, 93%, 94%, 95%, 96%, 97%, 98%, 99%, or 100% sequence identity to any one of SEQ ID NOs: 2476-2523, optionally wherein the sequence lacks the HA tag sequence (SEQ ID NO: 50).
[0198] 132. The bifunctional polypeptide of any one of embodiments 121-130, wherein the bifunctional polypeptide comprises or consists of an amino acid sequence having at least 80%, 85%, 86%, 87%, 88%, 89%, 90%, 91%, 92%, 93%, 94%, 95%, 96%, 97%, 98%, 99%, or 100% sequence identity to any one of the SEQ ID NOs in Table 20 and/or 21, optionally excluding any one of the SEQ ID NOs having a Grade of D, optionally wherein the sequence lacks the HA tag sequence (SEQ ID NO: 50).
[0199] 133. The bifunctional polypeptide of any one of embodiments 121-130, wherein the bifunctional polypeptide comprises or consists of an amino acid sequence of any one of the SEQ ID NOs in Table 20, optionally wherein the sequence lacks the HA tag sequence (SEQ ID NO: 50).
[0200] 134. The bifunctional polypeptide of any one of embodiments 121-133, wherein the bifunctional polypeptide does not comprise or consist of an amino acid sequence of any one of the SEQ ID NOs in Tables 21 having a Grade of C and/or D, optionally wherein the sequence lacks the HA tag sequence (SEQ ID NO: 50).
[0201] 135. The bifunctional polypeptide of any one of embodiments 121-134, wherein the URD is not derived from beta-TRCP, optionally wherein the URD does not comprise or consist of bTRCP.1, optionally wherein the URD does not comprise or consist of SEQ ID NO: 1839.
[0202] 136. A polynucleotide encoding a bifunctional polypeptide comprising or consisting of the bifunctional polypeptide of any one of embodiments 121-135.
[0203] 137. The bifunctional polypeptide of any one of embodiments 19-59, wherein the target protein is HTT.
[0204] 138. The bifunctional polypeptide of embodiment 137, wherein the HTT protein is a mutant form of HTT (SEQ ID NO: 2) comprising a polyglutamine expansion at least 36 amino acids long.
[0205] 139. The bifunctional polypeptide of any one of embodiments 137-138, wherein the bifunctional polypeptide comprises a localization peptide sequence which directs the bifunctional polypeptide to the nucleus of a cell, the cytoplasm of a cell, or the nucleus and the cytoplasm of a cell, optionally wherein the localization peptide sequence comprises or consists of the NLS sequence of MYC, or FBXW7-alpha, optionally wherein the localization peptide sequence comprises or consists of the NLS sequence of MYC.
[0206] 140. The bifunctional polypeptide of embodiment 139, wherein the NLS comprises or consists of a sequence selected from any one of SEQ ID NOs: 1902, 1904 and 1908, optionally wherein the NLS comprises or consists of a sequence selected from any one of SEQ ID NOs: 1902 or 1904.
[0207] 141. The bifunctional polypeptide of any one of embodiments 137-140, wherein the URD is derived from a URD selected from the group consisting of CHIP, DCAF1, E6AP, FBXW7-alpha, FBXW7-beta, KEAP1, NHLRC1, RNF4, RNF12, RNF20, RNF125, RNF128, RNF138, RNF182, SPOP, VIF, and ZNRF1, optionally wherein the URD is a truncation or fragment thereof that retains ubiquitin-proteasome recruiting activity, optionally wherein the URD is derived from FBXW7-alpha, FBXW7-beta, RNF4, RNF12, or VIF, optionally wherein the URD is truncation or fragment thereof that retains ubiquitin-proteasome recruiting activity.
[0208] 142. The bifunctional polypeptide of embodiment 141, wherein the URD comprises or consists of a sequence selected from any one of SEQ ID NOs: 1836-1838, 1840-1862, 1867-1877, 1882-1884, 1886, and 1893, optionally wherein the URD comprises or consists of a sequence selected from any one of SEQ ID NOs: 1840-1852, 1857, 1867, 1868, and 1886
[0209] 143. The bifunctional polypeptide of any one of embodiments 137-142, wherein the URD comprises or consists of CHIP.1, DCAF1.1, E6AP.1, FBXW7a. 1, FBXW7a.2, FBXW7a.3, FBXW7a.4, FBXW7a.5, FBXW7a.6, FBXW7a.7, FBXW7a.8, FBXW7a.9, FBXW7b.1, FBXW7b.2. FBXW7b.3, FBXW7b.4, KEAP1.1, NHLRC1.1, RNF12.1, RNF 12.2. RNF125.1, RNF128.1, RNF138.1, RNF182.1, RNF20.1, RNF4.1, SPOP.1, VIF.1, ZNRF1.1, optionally wherein the URD comprises or consists of FBXW7a. 1, FBXW7a.2, FBXW7a.3, FBXW7a.4, FBXW7a.5, FBXW7a.6, FBXW7a.7, FBXW7a.8, FBXW7a.9, FBXW7b.1, FBXW7b.2, FBXW7b.3, FBXW7b.4, RNF4.1, RNF 12.1, RNF 12.2, or VIF. 1.
[0210] 144. The bifunctional polypeptide of embodiment 143, wherein the URD comprises or consists of a sequence selected from any one of SEQ ID NOs: 1836-1838, 1840-1854, 1857, 1858, 1867-1869, 1876, 1877, 1882, 1884, 1886, and 1893, optionally wherein the URD comprises or consists of a sequence selected from any one of SEQ ID NOs: 1840-1852, 1857, 1867, 1868, and 1886.
[0211] 145. The bifunctional polypeptide of any one of embodiments 137-144, wherein the targeting moiety binds, or binds at least in part, to at least a portion of:
   [0212] a) the portion of HTT that is encoded by exon 1 of the HTT;
   [0213] b) amino acids 1-88 of HTT (SEQ ID NO: 2) or an analogous region in pathological forms of HTT;
   [0214] c) amino acids 1-20 of HTT (SEQ ID NO: 2);
   [0215] d) amino acids 1-17 of HTT (SEQ ID NO: 2),
   [0216] e) the poly-glutamine (polyQ) tract of HTT, optionally amino acids 18-38 of HTT (SEQ ID NO: 2) or an analogous region in pathological forms of HTT, or
   [0217] f) the proline rich region (PRR) of HTT, optionally amino acids 39-76 of HTT (SEQ ID NO: 2) or an analogous region in pathological forms of HTT.
[0218] 146. The bifunctional polypeptide of any one of embodiments 137-145, wherein the targeting moiety comprises or consists of a Fab, F(ab′)₂, Fab′, scFv, or sdAb, optionally comprising or consisting of either a V_{H} domain or a V_{L} domain of an IgG antibody, or a V_{H}H, V_{H}, or V_{NAR} domain of a heavy chain antibody (HcAb), optionally wherein the targeting moiety comprises or consists of a scFv or V_{L} domain.
[0219] 147. The bifunctional polypeptide of embodiment 146, wherein the targeting moiety comprises or consists of VL12.3.
[0220] 148. The bifunctional polypeptide of embodiment 146, wherein the targeting moiety comprises or consists of a sdAb, optionally a V domain, comprising a CDR1 comprising or consisting of SEQ ID NO: 2089, a CDR2 comprising or consisting of SEQ ID NO: 2091, and a CDR3 comprising or consisting of SEQ ID NO: 2093, optionally wherein each CDR sequence independently comprises 1, 2, 3, 4, 5, 6, 7, or more substitutions and/or 1, 2, 3, 4, 5, 6, 7, or more deletions or additions, and/or has at least 90%, 91%, 92%, 93%, 94%, 95%, 96%, 97%, 98%, 99%, or 100% sequence identity to a sequence selected from any one of SEQ ID NOs: 2089, 2091, and 2093.
[0221] 149. The bifunctional polypeptide of embodiment 148, wherein the sdAb, optionally a V_{L} domain, comprises or consists of a framework region sequence comprising or consisting of the framework region of SEQ ID NO: 2078, optionally wherein framework region comprises 1, 2, 3, 4, 5, 6, 7, 8, 9, 10, 11, 12, 13, 14, 15, 16, 17 or more substitutions and/or 1, 2, 3, 4, 5, 6, 7, 8, 9, 10, 11, 12, 13, 14, 15, 16, 17 or more deletions or additions, and/or have at least 90%, 91%, 92%, 93%, 94%, 95%, 96%, 97%, 98%, 99%, or 100% sequence identity to the framework region of SEQ ID NO: 2078.
[0222] 150. The bifunctional polypeptide of any one of embodiments 146-149, wherein the targeting moiety comprises or consists of SEQ ID NO: 2078, optionally wherein each CDR sequence independently comprises 1, 2, 3, 4, 5, 6, 7, or more substitutions and/or 1, 2, 3, 4, 5, 6, 7, or more deletions or additions, and/or has at least 90%, 91%, 92%, 93%, 94%, 95%, 96%, 97%, 98%, 99%, or 100% sequence identity to a CDR sequence of SEQ ID NO: 2078, and/or wherein the framework region comprises 1, 2, 3, 4, 5, 6, 7, 8, 9, 10, 11, 12, 13, 14, 15, 16, 17 or more substitutions and/or 1, 2, 3, 4, 5, 6, 7, 8, 9, 10, 11, 12, 13, 14, 15, 16, 17 or more deletions or additions, and/or has at least 90%, 91%, 92%, 93%, 94%, 95%, 96%, 97%, 98%, 99%, or 100% sequence identity to the framework region of SEQ ID NO: 2078.
[0223] 151. The bifunctional polypeptide of any one of embodiments 146-150, wherein the bifunctional polypeptide comprises or consists of an amino acid sequence having at least 80%, 85%, 86%, 87%, 88%, 89%, 90%, 91%, 92%, 93%, 94%, 95%, 96%, 97%, 98%, 99%, or 100% sequence identity to any one of SEQ ID NO: 2524-2613 and 2704-2730, optionally wherein the sequence lacks the HA tag sequence (SEQ ID NO: 50).
[0224] 152. The bifunctional polypeptide of embodiment 146, wherein the targeting moiety comprises or consists of INT41.
[0225] 153. The bifunctional polypeptide of embodiment 146, wherein the targeting moiety comprises or consists of a scFv comprising a V_{H} CDR1 comprising or consisting of SEQ ID NO: 2097, a V_{H} CDR2 comprising or consisting of SEQ ID NO: 2099, a V_{H} CDR3 comprising or consisting of SEQ ID NO: 2101, a V_{L} CDR1 comprising or consisting of SEQ ID NO: 2105, a V_{L} CDR2 comprising or consisting of SEQ ID NO: 2107, a V_{L} CDR3 comprising or consisting of SEQ ID NO: 2109, optionally wherein each CDR sequence independently comprises 1, 2, 3, 4, 5, 6, 7, or more substitutions and/or 1, 2, 3, 4, 5, 6, 7, or more deletions or additions, and/or has at least 90%, 91%, 92%, 93%, 94%, 95%, 96%, 97%, 98%, 99%, or 100% sequence identity to a sequence selected from any one of SEQ ID NOs: 2097, 2099, 2101, 2105, 2107, and 2109.
[0226] 154. The bifunctional polypeptide of embodiment 153, wherein the scFv comprises or consists of a framework region sequence comprising or consisting of the framework region of SEQ ID NO: 2095, optionally wherein framework region comprises 1, 2, 3, 4, 5, 6, 7, 8, 9, 10, 11, 12, 13, 14, 15, 16, 17 or more substitutions and/or 1, 2, 3, 4, 5, 6, 7, 8, 9, 10, 11, 12, 13, 14, 15, 16, 17 or more deletions or additions, and/or has at least 90%, 91%, 92%, 93%, 94%, 95%, 96%, 97%, 98%, 99%, or 100% sequence identity to the framework region of SEQ ID NO: 2095.
[0227] 155. The bifunctional polypeptide of any one of embodiments 152-154, wherein the targeting moiety comprises or consists of SEQ ID NO: 2095, optionally wherein each CDR sequence independently comprises 1, 2, 3, 4, 5, 6, 7, or more substitutions and/or 1, 2, 3, 4, 5, 6, 7, or more deletions or additions, and/or has at least 90%, 91%, 92%, 93%, 94%, 95%, 96%, 97%, 98%, 99%, or 100% sequence identity to a CDR sequence of SEQ ID NO: 2095, and/or wherein the framework region comprises 1, 2, 3, 4, 5, 6, 7, 8, 9, 10, 11, 12, 13, 14, 15, 16, 17 or more substitutions and/or 1, 2, 3, 4, 5, 6, 7, 8, 9, 10, 11, 12, 13, 14, 15, 16, 17 or more deletions or additions, and/or has at least 90%, 91%, 92%, 93%, 94%, 95%, 96%, 97%, 98%, 99%, or 100% sequence identity to the framework region of SEQ ID NO: 2095.
[0228] 156. The bifunctional polypeptide of any one of embodiments 146 and 152-155, wherein the bifunctional polypeptide comprises or consists of an amino acid sequence having at least 80%, 85%, 86%, 87%, 88%, 89%, 90%, 91%, 92%, 93%, 94%, 95%, 96%, 97%, 98%, 99%, or 100% sequence identity to any one of SEQ ID NOs: 2614-2703 and 2731-2746, optionally wherein the sequence lacks the HA tag sequence (SEQ ID NO: 50).
[0229] 157. The bifunctional polypeptide of any one of embodiments 146-150 or 152-155, wherein the bifunctional polypeptide comprises or consists of an amino acid sequence having at least 80%, 85%, 86%, 87%, 88%, 89%, 90%, 91%, 92%, 93%, 94%, 95%, 96%, 97%, 98%, 99%, or 100% sequence identity to any one of the SEQ ID NOs in Table 23, 24 and/or 25, optionally excluding any one of the SEQ ID NOs having a Grade of D, optionally wherein the sequence lacks the HA tag sequence (SEQ ID NO: 50).
[0230] 158. The bifunctional polypeptide of any one of embodiments 146-150 or 152-155, wherein the bifunctional polypeptide comprises or consists of an amino acid sequence of any one of the SEQ ID NOs in Table 23 and/or 24, optionally wherein the sequence lacks the HA tag sequence (SEQ ID NO: 50).
[0231] 159. The bifunctional polypeptide of any one of embodiments 146-158, wherein the bifunctional polypeptide does not comprise or consist of an amino acid sequence of any one of the SEQ ID NOs in Tables 25 having a Grade of C and/or D, optionally wherein the sequence lacks the HA tag sequence (SEQ ID NO: 50).
[0232] 160. A polynucleotide encoding a bifunctional polypeptide comprising or consisting of the bifunctional polypeptide of any one of embodiments 137-159.
[0233] 161. The polypeptide or bifunctional polypeptide of any one of embodiments 19-76, 79-102, 105-119, 121-135, 137-159, further comprising one or more linker peptides, wherein the linker peptide is positioned between one or more of: the targeting moiety and the URD; the NLS and the targeting moiety; the NLS and the URD; and/or the NLS and an epitope tag, optionally an HA tag.
[0234] 162. The bifunctional polypeptide of embodiment 161, wherein the linker peptide is positioned between the targeting moiety and the URD.
[0235] 163. The bifunctional polypeptide of any one of embodiments 161-162, wherein the linker peptide is 0, 1, 2, 3, 4, 5, 6, 7, 8, 9, 10, 11, 12, 13, 14, 15, 16, 17, 18, 19, 20, 21, 22, 23, 24, 25, 26, 27, 28, 29 or 30 amino acids in length, or a range defined by any two of the preceding values, optionally 0-30, 1-30, 2-30, 0-20, 1-20, 2-20, 0-15, 0-12, 0-10, 1-15, 1-12, 1-10, 2-15, 2-12, 2-10, 3-15, 3-12, or 3-10 amino acids in length, optionally 2-30.
[0236] 164. The bifunctional polypeptide of any one of embodiments 161-163, wherein the linker peptide comprises or consists of glycine and serine
[0237] 165. The bifunctional polypeptide of any one of embodiments 161-164, wherein the linker peptide comprises or consists of one or more alpha helixes, optionally flanked by one or more glycine and/or a serine residues.
[0238] 166. The bifunctional polypeptide of any one of embodiments 161-165, wherein the linker peptide comprises or consists of the amino acid sequence of any one of SEQ ID NOs: 2138-2176
[0239] 167. The bifunctional polypeptide of any one of embodiments 19-76, 79-102, 105-119, 121-135, 137-159, 161-166, wherein the orientation of the targeting moiety relative to the URD is the same orientation as compared to the naturally occurring substrate recognition domain of the protein from which the URD is derived.
[0240] 168. The bifunctional polypeptide of any one of embodiments 19-76, 79-102, 105-119, 121-135, 137-159, 161-166, wherein the orientation of the targeting moiety relative to the URD is the opposite orientation as compared to the naturally occurring substrate recognition domain of the protein from which the URD is derived.
[0241] 169. The bifunctional polypeptide of any one of embodiments 19-76, 79-102, 105-119, 121-135, 137-159, 161-168, wherein the targeting moiety is N-terminal relative to the URD.
[0242] 170. The bifunctional polypeptide of any one of embodiments 19-76, 79-102, 105-119, 121-135, 137-159, 161-168, wherein the targeting moiety is C-terminal relative to the URD.
[0243] 171. The bifunctional polypeptide of any one of embodiments 19-76, 79-102, 105-119, 121-135, 137-159, 161-170, further comprising an epitope tag, optionally a hemagglutinin (HA) tag, optionally wherein the HA tag comprises or consists of the amino acid sequence of SEQ ID NO: 50, wherein the epitope tag can be used to visualize the bifunctional polypeptide.
[0244] 172. The bifunctional polypeptide of any one of embodiments 19-76, 79-102, 105-119, 121-135, 137-159, 161-170, wherein the polypeptide does not comprise an epitope tag, optionally a hemagglutinin (HA) tag, optionally wherein the polypeptide does not comprise an HA tag comprising or consisting of the amino acid sequence of SEQ ID NO: 50.
[0245] 173. The polypeptide or bifunctional polypeptide of any one of embodiments 1-172, wherein the polypeptide or bifunctional polypeptide is, or is less than, 50, 60, 70, 80, 90, 100, 110, 120, 130, 140, 150, 160, 170, 180, 190, 200, 250, 300, 350, 400, 450, 500, 550, 600, 650, 700, 750, or 800 amino acids long, or a range defined by any two of the preceding values, optionally 50-800, 50-650, 50-500, 50-400, 70-800, 70-650, 70-500, 70-400, 70-300, 70-200, 80-800, 80-650, 80-500, 80-400, 80-300, or 80-200 amino acids long, optionally 90-550, 150-550, or 80-450 amino acids long
[0246] 174. The polypeptide or bifunctional polypeptide of any one of embodiments 1-76, 79-102, 105-119, 121-135, 137-159, 161-173, wherein the polypeptide or bifunctional polypeptide comprises or consists of an amino acid sequence having at least 80%, 85%, 86%, 87%, 88%, 89%, 90%, 91%, 92%, 93%, 94%, 95%, 96%, 97%, 98%, 99%, or 100% sequence identity to:
   [0247] i) any one of SEQ ID NOs: 2177-2328, 2331-3205 and 3238,
   [0248] ii) any one of SEQ ID NOs: 2177-2328, 2331-3205 and 3238 wherein the sequence lacks the HA tag sequence (SEQ ID NO: 50), or
   [0249] iii) the polypeptide encoded by the polynucleotide of any one of SEQ ID NOs: 3207-3235.
[0250] 175. A polypeptide comprising or consisting of an amino acid sequence having at least 80%, 85%, 86%, 87%, 88%, 89%, 90%, 91%, 92%, 93%, 94%, 95%, 96%, 97%, 98%, 99%, or 100% sequence identity to:
   [0251] i) any one of SEQ ID NOs: 1836-1895;
   [0252] ii) any one of SEQ ID NOs: 1896-1909;
   [0253] iii) any one of SEQ ID NOs: 1918, 1926, 1934, 1942, 1950, 1958, 1966, 1974, 1982, 1990, 1998, 2006, 2014, 2022, 2030, 2038, 2046, 2054, 2062, 2070, 2078, 2086, 2087, 2095, and 2111-2137;
   [0254] iv) any one of SEQ ID NOs: 2177-2328, 2331-3205 and 3238;
   [0255] v) any one of SEQ ID NOs: 2177-2328, 2331-3205 and 3238 wherein the sequence lacks the HA tag sequence (SEQ ID NO: 50); or
   [0256] vi) the polypeptide encoded by the polynucleotide of any one of SEQ ID NOS: 3207-3235.
[0257] 176. The polypeptide of embodiment 175, wherein the polypeptide is a non-natural polypeptide.
[0258] 177. A polynucleotide encoding for a polypeptide having at least 80%, 85%, 86%, 87%, 88%, 89%, 90%, 91%, 92%, 93%, 94%, 95%, 96%, 97%, 98%, 99%, or 100% sequence identity to the bifunctional polypeptide of any one of embodiments 19-76, 79-102, 105-119, 121-135, 137-159, 161-176.
[0259] 178. The polynucleotide of any one of embodiments 77, 78, 103, 104, 120, 136, 160, and 177, wherein the polynucleotide is a DNA or an RNA, optionally an mRNA or a circular RNA, optionally wherein the RNA, mRNA or circular RNA comprises one or more modified nucleosides, optionally wherein up to 100% of the nucleotides comprising uracil are replaced with pseudouridine and/or N1-methylpseudouridine.
[0260] 179. The polynucleotide of any one of embodiments 177-178, wherein the polynucleotide is packaged in a lipid nanoparticle, a polymeric nanoparticle, an extracellular vesicle, optionally an exosome, or a viral vector, optionally a replicating viral vector or a non-replicating viral vector, optionally an adenovirus, adeno-associated virus, lentivirus, or retrovirus vector.
[0261] 180. A pharmaceutical composition comprising the polypeptide, bifunctional polypeptide or polynucleotide of any one of embodiments 1-179 and one or more pharmaceutically acceptable excipients, carriers, or diluents.
[0262] 181. The pharmaceutical composition embodiment 180, wherein the composition is formulated for intravenous, intraperitoneal, intra-arterial, subcutaneous, intramuscular, intrathecal, intratumoral, inhalation, or intracranial administration.
[0263] 182. The polypeptide, bifunctional polypeptide, polynucleotide, or pharmaceutical composition of any one of embodiments 1-181 for use in the treatment of a cancer or neurodegenerative disease, optionally Huntington's disease, in a patient in need thereof.
[0264] 183. The polypeptide, bifunctional polypeptide, polynucleotide, or pharmaceutical composition of any one of embodiments 1-181 for use in the manufacture of a medicament, optionally for the treatment of cancer or a neurodegenerative disease, optionally Huntington's disease.
[0265] 184. A method of treating a subject comprising administering the polypeptide, bifunctional polypeptide, polynucleotide, or pharmaceutical composition of any one of embodiments 1-181 to a subject in need thereof, optionally wherein the subject has a cancer or a neurodegenerative disease, optionally Huntington's disease.
[0266] 185. A method of reducing the amount of a target protein in a cell comprising contacting the cell with the polypeptide, bifunctional polypeptide, polynucleotide, or pharmaceutical composition of any one of embodiments 1-52, 54-104, 121-183, optionally wherein the target protein is selected from MYC, (optionally c-MYC), CTNNB1, FOXP3, and/or HTT.
[0267] 186. A method of reducing the amount of a target protein in a cell comprising contacting the cell with the polypeptide, bifunctional polypeptide, polynucleotide, or pharmaceutical composition of any one of embodiments 1-49, 53-59, 105-120, 161-183, optionally wherein the target protein is PCNA
[0268] 187. The method of embodiment 185 or 186, wherein said cell is in a subject, and said contacting comprises administering the polypeptide, bifunctional polypeptide, polynucleotide, or pharmaceutical composition of any one of embodiments 1-181 to the subject, optionally wherein the subject has cancer or a neurodegenerative disease, optionally Huntington's disease.
[0269] 188. The method of embodiment 187, wherein the administering is intravenous, intraperitoneal, intra-arterial, subcutaneous, intramuscular, intrathecal, intratumoral, inhalation, or intracranial administration.
[0270] 189. The method of any one of embodiments 185 or 186, wherein the cell is ex vivo, and said contacting comprises contacting the polypeptide, bifunctional polypeptide, polynucleotide, or pharmaceutical composition of any one of embodiments 1-181 to the cell ex vivo, optionally in an adoptive cell therapy.
[0271] 190. The method of embodiment 189, further comprising administering the cell to a subject after the contacting step, optionally wherein the subject is also the source of the cell.
[0272] 191. The polypeptide, bifunctional polypeptide, polynucleotide, pharmaceutical composition, or method of any one of the preceding embodiments, wherein the polypeptide or bifunctional polypeptide promotes proteasome-mediated degradation of the target protein when measured in one or more assays described in Exemplary Assays for assessing proteasomal-mediated degradation, for example, by HiBIT tag assay and/or Western blot, optionally wherein the proteasome-mediated degradation is inhibited when the cells comprising the target protein and the bifunctional polypeptide are treated with a proteasome inhibitor.
[0273] 192. The polypeptide, bifunctional polypeptide, polynucleotide, pharmaceutical composition, or method of embodiment 191, wherein treatment of the cells comprising the target protein and the polypeptide or bifunctional polypeptide with a proteasome inhibitor reduces the amount of degradation of the target protein by at least 50%, 60%, 70%, 80%, 90%, 95% or 100% as compared to cells not treated with the proteasome inhibitor.
[0274] 193. The bifunctional polypeptide, polypeptide, polynucleotide, pharmaceutical composition, or method of any one of the preceding embodiments, wherein the polypeptide or bifunctional polypeptide does not comprise a URD derived from CHIP, SPOP, TRIM21 or beta-TRCP.
[0275] 194. The polypeptide, bifunctional polypeptide, polynucleotide, pharmaceutical composition, or method of any one of the preceding embodiments, wherein the polypeptide or bifunctional polypeptide comprises only a single targeting moiety, optionally wherein the bifunctional polypeptide is not a dual-specific bifunctional polypeptide.

[0276] Some embodiments provided herein are described by way of the following provided numbered embodiments:
[0277] 1. A bifunctional polypeptide that promotes proteasome-mediated degradation of a target protein, comprising: a) a targeting moiety that is capable of binding to the target protein, and b) a ubiquitin-proteasome system recruiting domain (URD), wherein proximity of the bifunctional polypeptide to the target protein through binding of the targeting moiety induces ubiquitination of the target protein via the URD, thereby promoting proteasome-mediated degradation of the target protein 2. The bifunctional polypeptide of embodiment 1, wherein the target protein is selected from MYC, optionally c-MYC, beta catenin 1 (CTNNB1), forkhead box P3 (FOXP3), and huntingtin (HTT). 3. The bifunctional polypeptide of embodiment 2, wherein the targeting moiety binds, or binds at least in part, to at least a portion of: a) the DNA binding domain of MYC; b) the armadillo domain of CTNNB1; c) the DNA binding domain of FOXP3; or d) the portion of HTT that is encoded by exon 1 of the HTT gene. 4. The bifunctional polypeptide of any one of embodiments 1-3, wherein the targeting moiety binds, or binds at least in part, to at least a portion of the target protein selected from the portion consisting of: a) amino acids 54-406 of MYC (SEQ ID NO: 1), b) amino acids 354-406 of MYC (SEQ ID NO: 1), c) amino acids 408-437 of MYC (SEQ ID NO: 1), d) amino acids 410-419 of MYC (SEQ ID NO: 1), e) amino acids 337-423 of FOXP3 (SEQ ID NO: 8), f) amino acids 284-304 of FOXP3 (SEQ ID NO: 8), g) amino acids 1-88 of HTT (SEQ ID NO: 2) or an analogous region in pathological forms of HTT, h) amino acids 1-20 of HTT (SEQ ID NO: 2), i) amino acids 1-17 of HTT (SEQ ID NO: 2), j) the poly-glutamine (polyQ) tract of HTT, optionally amino acids 18-38 of HTT (SEQ ID NO: 2) or an analogous region in pathological forms of HTT, k) the proline rich region (PRR) of HTT, optionally amino acids 39-76 of HTT (SEQ ID NO: 2) or an analogous region in pathological forms of HTT, 1) amino acids 150-663 of CTNNB1 (SEQ ID NO: 3), m) amino acids 15-29 of CTNNB1 (SEQ ID NO: 3), and n) amino acids 249-265, 292-306, 379-390, 415-429, 462-470, or 505-519, or any combination thereof, of CTNNB1 (SEQ ID NO: 3). 5. The bifunctional polypeptide of any one of embodiments 1-4, wherein the targeting moiety is an endogenous binding partner of the target protein, antibody, Fab, F(ab′)₂, Fab′, scFv, sdAb, V_{H} domain, V_{L}, domain, V_{H}H, V_{NAR}, diabody, intrabody, DARPin, monobody, affibody, avimer, or any fragment or derivative thereof. 6. The bifunctional polypeptide of any one of embodiments 1-5, wherein the targeting moiety is less than or equal to 260, 259, 258, 257, 256, 255, 254, 253, 252, 251, 250, 245, 240, 235, 230, 225, 220, 215, 210, 205, 200, 195, 190, 185, 180, 175, 170, 165, 160, 155, 150, 145, 140, 135, 130, 129, 128, 127, 126, 125, 124, 123, 122, 121, 120, 119, 118, 117, 116, 115, 114, 113, 112, 110, 109, 108, 107, 106, 105, 104, 103, 102, 101, 100, 99, 98, 97, 96, 95, 94, 93, 92, 91, 90, 89, 88, 87, 86, 85, 84, 83, 82, 81, 80, 75, 70, 65, 60, 55, 54, 53, 54, 53, 52, 51, 50, 49, 48, 47, 46, 45, 44, 43, 42, 41, 40, 39, 38, 37, 36, 35, 34, 33, 32, 31, 30, 29, 28, 27, 26, 25, 24, 23, 22, 21, 20, 19, 18, 17, 16, 15, 14, 13, 12, 11, or 10 amino acids long, or a range defined by any two of the preceding values. 7. The bifunctional polypeptide of any one of embodiments 1-6, wherein the targeting moiety is selected from 3DX.1, 3DX.2, Omomye, FOXP3 DNA binding domain (FOXP3DBD), FOXP3, VE12.3, INT41, amino acids 10-54 of TCF4 (TCF4 peptide), TCF4, BC2, or a fragment thereof that is capable of binding to the target protein. 8. The bifunctional polypeptide of any one of embodiments 1-7, wherein the targeting moiety comprises or consists of an amino acid sequence having at least 80%, 85%, 86%, 87%, 88%, 89%, 90%, 91%, 92%, 93%, 94%, 95%, 96%, 97%, 98%, 99%, or 100% sequence identity to any one of SEQ ID NO: 4-13. 9. The bifunctional polypeptide of any one of embodiments 1-8, wherein the URD is derived from an E3 ubiquitin ligase. 10. The bifunctional polypeptide of any one of embodiments 1-9, wherein the URD is derived from CHIP, RNF114, RNF125, RNF138, RNF166, NHLRC1, CBL-b (Y363E), TRIM21, E6AP, FBXW7 alpha, FBXW7 beta, beta-TRCP, Keap1, SPOP, or DCAF1, or a truncation or fragment thereof that retains ubiquitin-proteasome recruiting activity. 11 The bifunctional polypeptide of any one of embodiments 1-10, wherein the URD is selected from a RING domain, optionally RNF114, RNF125, RNF138, RNF166, NHLRC1, CBL-b (Y363E), or TRIM21, and an H-box (Cul4-DDB1) domain, optionally DCAF1, or a truncation or fragment thereof that retains ubiquitin-proteasome recruiting activity. 12. The bifunctional polypeptide of any one of embodiments 1-11, wherein the URD is selected from: the URD derived from a protein which localizes to the cytoplasm, optionally selected from FBXW7 beta and beta-TRCP; the URD derived from a protein which localizes to the nucleus, optionally selected from FBXW7 alpha and SPOP; and the URD derived from a protein which localizes to the cytoplasm and the nucleus, optionally selected from CHIP, RNF114, RNF125, RNF138, RNF166, NHLRC1, CBL-b (Y363E), TRIM21, E6AP, Keap1, and DCAF1; or a truncation or fragment of the URD that retains ubiquitin-proteasome recruiting activity; optionally wherein the protein is an E3 ubiquitin ligase. 13. The bifunctional polypeptide of any one of embodiments 1-12, wherein the URD is less than or equal to 370, 369, 368, 367, 366, 365, 364, 363, 362, 361, 360, 300, 250, 200, 175, 170, 165, 160, 155, 150, 145, 140, 135, 130, 129, 128, 127, 126, 125, 124, 123, 120, 115, 110, 105, 100, 95, 90, 85, 80, 75, 70, 65, 60, 55, 50, 47, 46, 45, 44, 43, 42, 41, 40, 39, 38, 37, 36, 35, 34, 33, 32, 31, 30, 25, or 20 amino acids long, or a range defined by any two of the preceding values. 14. The bifunctional polypeptide of any one of embodiments 1-13, wherein the URD comprises or consists of an amino acid sequence having at least 80%, 85%, 86%, 87%, 88%, 89%, 90%, 91%, 92%, 93%, 94%, 95%, 96%, 97%, 98%, 99%, or 100% sequence identity to any one of SEQ ID NO: 29-43, or a truncation or fragment thereof that retains ubiquitin-proteasome recruiting activity. 15. The bifunctional polypeptide of any one of embodiments 1-14, further comprising a linker peptide, wherein the linker peptide is positioned between the targeting moiety and the URD. 16. The bifunctional polypeptide of embodiment 15, wherein the linker peptide is 2 to 20 amino acids in length. 17. The bifunctional polypeptide of embodiment 15 or 16, wherein the linker peptide comprises or consists of glycine and serine. 18. The bifunctional polypeptide of any one of embodiments 15-17, wherein the linker peptide comprises or consists of the amino acid sequence of any one of SEQ ID NO. 44-49. 19. The bifunctional polypeptide of any one of embodiments 1-18, further comprising a nuclear localization signal (NLS) peptide. 20. The bifunctional polypeptide of embodiment 19, wherein the NLS peptide is located at the N-terminus of the bifunctional polypeptide, the C-terminus of the bifunctional polypeptide, or internally within the bifunctional polypeptide. 21. The bifunctional polypeptide of embodiment 19 or 20, wherein the NLS peptide comprises or consists of the amino acid sequence of SEQ ID NO: 51. 22. The bifunctional polypeptide of any one of embodiments 1-21, wherein the orientation of the targeting moiety relative to the URD is the same orientation as compared to the naturally occurring substrate recognition domain of the protein from which the URD is derived. 23. The bifunctional polypeptide of any one of embodiments 1-22, wherein the orientation of the targeting moiety relative to the URD is the opposite orientation as compared to the naturally occurring substrate recognition domain of the protein from which the URD is derived. 24. The bifunctional polypeptide of any one of embodiments 1-23, wherein the targeting moiety is N-terminal relative to the URD. 25. The bifunctional polypeptide of any one of embodiments 1-24, wherein the targeting moiety is C-terminal relative to the URD. 26. The bifunctional polypeptide of any one of embodiments 1-25, further comprising an epitope tag, optionally a hemagglutinin (HA) tag, optionally wherein the HA tag comprises or consists of the amino acid sequence of SEQ ID NO: 50, wherein the epitope tag can be used to visualize the bifunctional polypeptide. 27. The bifunctional polypeptide of any one of embodiments 1-26, wherein the polypeptide is less than or equal to 50, 60, 70, 80, 90, 100, 110, 120, 130, 140, 150, 160, 170, 180, 190, 200, 250, 300, 350, 400, 450, 500, 550, 600, 650, 700, 750, or 800 amino acids long, or a range defined by any two of the preceding values. 28. The bifunctional polypeptide of any one of embodiments 1-27, wherein the bifunctional polypeptide comprises or consists of an amino acid sequence having at least 80%, 85%, 86%, 87%, 88%, 89%, 90%, 91%, 92%, 93%, 94%, 95%, 96%, 97%, 98%, 99%, or 100% sequence identity to: i) the peptide of any one of SEQ ID NO. 72-1165, or ii) the peptide encoded by the polynucleotide of any one of SEQ ID NO: 1188-1835. 29. The bifunctional polypeptide of any one of embodiments 1-28, wherein the target protein is MYC. 30. The bifunctional polypeptide of embodiment 29, wherein the URD is the URD of CHIP, DCAF1, E6AP, FBXW7a, FBXW7b, beta-TRCP, Keap1, RNF114, RNF125, RNF138, NHLRC1, CBL-b (Y363E), TRIM21, or SPOP, or a truncation or fragment thereof that retains ubiquitin-proteasome recruiting activity. 31. The bifunctional polypeptide of embodiment 29 or 30, wherein the targeting moiety is 3DX 1. 32. The bifunctional polypeptide of embodiment 31, wherein the bifunctional polypeptide comprises or consists of an amino acid sequence having at least 80%, 85%, 86%, 87%, 88%, 89%, 90%, 91%, 92%, 93%, 94%, 95%, 96%, 97%, 98%, 99%, or 100% sequence identity to any one of SEQ ID NO: 72-155. 33. The bifunctional polypeptide of embodiment 29 or 30, wherein the targeting moiety is 3DX.2. 34. The bifunctional polypeptide of embodiment 33, wherein the bifunctional polypeptide comprises or consists of an amino acid sequence having at least 80%, 85%, 86%, 87%, 88%, 89%, 90%, 91%, 92%, 93%, 94%, 95%, 96%, 97%, 98%, 99%, or 100% sequence identity to any one of SEQ ID NO: 156-239. 35. The bifunctional polypeptide of embodiment 29 or 30, wherein the targeting moiety is Omomyc. 36. The bifunctional polypeptide of embodiment 35, wherein the bifunctional polypeptide comprises or consists of an amino acid sequence having at least 80%, 85%, 86%, 87%, 88%, 89%, 90%, 91%, 92%, 93%, 94%, 95%, 96%, 97%, 98%, 99%, or 100% sequence identity to any one of SEQ ID NO: 240-323. 37. The bifunctional polypeptide of any one of embodiments 1-28, wherein the target protein is FOXP3. 38. The bifunctional polypeptide of embodiment 37, wherein the URD is the URD of CHIP, DCAF1, E6AP, FBXW7a, FBXW7b, beta-TRCP, Keap1, RNF114, RNF125, RNF138, NHLRC1, CBL-b (Y363E), TRIM21, or SPOP, or a truncation or fragment thereof that retains ubiquitin-proteasome recruiting activity. 39. The bifunctional polypeptide of embodiment 37 or 38, wherein the targeting moiety is FOXP3DBD. 40. The bifunctional polypeptide of embodiment 39, wherein the bifunctional polypeptide comprises or consists of an amino acid sequence having at least 80%, 85%, 86%, 87%, 88%, 89%, 90%, 91%, 92%, 93%, 94%, 95%, 96%, 97%, 98%, 99%, or 100% sequence identity to any one of SEQ ID NO: 324-407. 41. The bifunctional polypeptide of any one of embodiments 1-28, wherein the target protein is HTT. 42. The bifunctional polypeptide of embodiment 41, wherein the URD is the URD of CHIP, DCAF1, E6AP, FBXW7a, FBXW7b, beta-TRCP, Keap1, RNF114, RNF125, RNF138, NHLRC1, CBL-b (Y363E), TRIM21, or SPOP, or a truncation or fragment thereof that retains ubiquitin-proteasome recruiting activity. 43. The bifunctional polypeptide of embodiment 41 or 42, wherein the targeting moiety is VL123. 44. The bifunctional polypeptide of embodiment 43, wherein the bifunctional polypeptide comprises or consists of an amino acid sequence having at least 80%, 85%, 86%, 87%, 88%, 89%, 90%, 91%, 92%, 93%, 94%, 95%, 96%, 97%, 98%, 99%, or 100% sequence identity to any one of SEQ ID NO: 408-563. 45. The bifunctional polypeptide of embodiment 41 or 42, wherein the targeting moiety is INT41. 46. The bifunctional polypeptide of embodiment 45, wherein the bifunctional polypeptide comprises or consists of an amino acid sequence having at least 80%, 85%, 86%, 87%, 88%, 89%, 90%, 91%, 92%, 93%, 94%, 95%, 96%, 97%, 98%, 99%, or 100% sequence identity to any one of SEQ ID NO: 564-719. 47. The bifunctional polypeptide of any one of embodiments 1-28, wherein the target protein is CTNNB1. 48. The bifunctional polypeptide of embodiment 47, wherein the URD is the URD of CHIP, DCAF1, E6AP, FBXW7a, FBXW7b, beta-TRCP, Keap1, RNF114, RNF125, RNF138, NHLRC1, CBL-b (Y363E), TRIM21, or SPOP, or a truncation or fragment thereof that retains ubiquitin-proteasome recruiting activity. 49. The bifunctional polypeptide of embodiment 47 or 48, wherein the targeting moiety is TCF4. 50. The bifunctional polypeptide of embodiment 49, wherein the bifunctional polypeptide comprises or consists of an amino acid sequence having at least 80%, 85%, 86%, 87%, 88%, 89%, 90%, 91%, 92%, 93%, 94%, 95%, 96%, 97%, 98%, 99%, or 100% sequence identity to any one of SEQ ID NO: 720-1009. 51. The bifunctional polypeptide of embodiment 47 or 48, wherein the targeting moiety is BC2. 52. The bifunctional polypeptide of embodiment 51, wherein the bifunctional polypeptide comprises or consists of an amino acid sequence having at least 80%, 85%, 86%, 87%, 88%, 89%, 90%, 91%, 92%, 93%, 94%, 95%, 96%, 97%, 98%, 99%, or 100% sequence identity to any one of SEQ ID NO: 1010-1165. 53. A polynucleotide encoding for a polypeptide having at least 80%, 85%, 86%, 87%, 88%, 89%, 90%, 91%, 92%, 93%, 94%, 95%, 96%, 97%, 98%, 99%, or 100% sequence identity to the bifunctional polypeptide of any one of embodiments 1-52. 54. The polynucleotide of embodiment 53, wherein the polynucleotide is a DNA or an RNA, optionally an mRNA or a circular RNA. 55. The polynucleotide of embodiment 53 or 54, wherein the polynucleotide is packaged in a lipid nanoparticle or a viral vector, optionally an adenovirus, adeno-associated virus, lentivirus, or retrovirus vector. 56. A pharmaceutical composition comprising the bifunctional polypeptide or polynucleotide of any one of embodiments 1-55 and one or more pharmaceutically acceptable excipients, carriers, or diluents. 57. The bifunctional polypeptide, polynucleotide, or pharmaceutical composition of any one of embodiments 1-56 for use in the treatment of a cancer or neurodegenerative disease, optionally Huntington's disease, in a patient in need thereof. 58. The bifunctional polypeptide, polynucleotide, or pharmaceutical composition of any one of embodiments 1-57 for use in the manufacture of a medicament, optionally for the treatment of cancer or a neurodegenerative disease, optionally Huntington's disease. 59. A method of treating a subject comprising administering the bifunctional polypeptide, polynucleotide, or pharmaceutical composition of any one of embodiments 1-57 to a subject in need thereof, optionally wherein the subject has a cancer or a neurodegenerative disease, optionally Huntington's disease. 60. A method of reducing the amount of a target protein in a cell comprising contacting the cell with the bifunctional polypeptide, polynucleotide, or pharmaceutical composition of any one of embodiments 1-57, optionally wherein the target protein is selected from MYC, optionally c-MYC, beta catenin 1 (CTNNB1), forkhead box P3 (FOXP3), and huntingtin (HTT). 61. The method of embodiment 60, wherein said cell is in a subject, and said contacting comprises administering the bifunctional polypeptide, polynucleotide, or pharmaceutical composition of any one of embodiments 1-57 to the subject, optionally wherein the subject has cancer or a neurodegenerative disease, optionally Huntington's disease. 62. The method of embodiment 60, wherein the cell is ex vivo, and said contacting comprises contacting the bifunctional polypeptide, polynucleotide, or pharmaceutical composition of any one of embodiments 1-57 to the cell ex vivo, optionally in an adoptive cell therapy. 63. The method of embodiment 62, further comprising administering the cell to a subject after the contacting step, optionally wherein the subject is also the source of the cell. 64. The bifunctional polypeptide, polynucleotide, pharmaceutical composition, or method of any one of the preceding embodiments, wherein the bifunctional polypeptide promotes proteasome-mediated degradation of the target protein when measured in one or more assays described in Example 1, for example, by Western blot, optionally wherein the proteasome-mediated degradation is inhibited when the cells comprising the target protein and the bifunctional polypeptide are treated with a proteasome inhibitor 65. The bifunctional polypeptide, polynucleotide, pharmaceutical composition, or method of embodiment 64, wherein treatment of the cells comprising the target protein and the bifunctional polypeptide with a proteasome inhibitor reduces the amount of degradation of the target protein by at least 50%, 60%, 70%, 80%, 90%, 95% or 100% as compared to cells not treated with the proteasome inhibitor.

### BRIEF DESCRIPTION OF THE DRAWINGS

[0278] In addition to the features described above, additional features and variations will be readily apparent from the following descriptions of the drawings and exemplary embodiments. It is to be understood that these drawings depict typical embodiments and are not intended to be limiting in scope.

[0279] FIG. 1 depicts an embodiment of a schematic describing proteasome-mediated degradation of a target protein using a bifunctional polypeptide disclosed herein, which comprise both a targeting domain specific for the target protein and a URD comprising an E3 ligase or component, fragment, or truncation thereof that recruits the ubiquitination complex to ubiquitinate the target protein for proteasomal degradation.

[0280] FIG. 2 depicts an embodiment of a schematic for different ordering combinations of the components that make up the bifunctional polypeptides of some embodiments disclosed herein. Generally, the bifunctional polypeptides will comprise a ubiquitin-proteasome system recruiting domain (URD) and a target binder (targeting moiety) that is specific for a target protein. These two components may be separated by a linker, which allows for flexibility in positioning between the URD and target binder. In some cases, the bifunctional polypeptides may further comprise a nuclear localization signal (NLS), which may be at the N-terminus, C-terminus, or internally within the bifunctional polypeptide (e.g., if the URD and/or target binder comprises an NLS within its sequence), if the target protein localizes to the nucleus of a cell.

[0281] FIG. 3 depicts an embodiment of subcellular localization of SPOP variant URD bifunctional polypeptides to the nucleus and the cytoplasm.

[0282] FIG. 4 depicts an embodiment of subcellular localization of NHLRC1 containing bifunctional polypeptides with and without an exogenous NLS sequence. 100201 FIG. 5 depicts an embodiment of subcellular localization of VL12.3 containing bifunctional polypeptides with URDs containing endogenous NLS or NES signals.

[0283] FIG. 6 depicts an embodiment of various exemplary bifunctional polypeptides listing the target protein (“Target”), description of elements listed in a N- to C-terminal direction, and respective SEQ ID NOs. Note that SEQ ID NO: 3228 targeting MYC (HA-RNF125.2-(GS)₂-mycV.1500-hrpNLS) is not in sequential order.

### DETAILED DESCRIPTION OF THE DISCLOSURE

[0284] The ubiquitin-proteasome system is the major and essential mechanism by which eukaryotic cells regulate protein abundance and clear misfolded or damaged proteins through proteolytic degradation. This regulation is vital for many cellular functions, such as regulating the cell cycle and gene expression. Proteins are marked for degradation and recognized by the proteasomal complex when they are polyubiquitinated at lysine residues. This polyubiquitination is mediated by recognition of the target proteins by a E3 ubiquitin ligase, which catalyzes the transfer of a ubiquitin subunit from an E2 ubiquitin-conjugating enzyme to the protein target. As ubiquitin also contains ubiquitination sites, the protein target can be polyubiquitinated, thereby marking it for degradation by the proteasome. It is estimated that there are over 600 unique E3 ubiquitin ligases encoded by the human genome, each having varying specificities to target proteins. Therefore, each E3 ubiquitin ligase generally comprises a substrate recognition domain specific for one or more targets and a ubiquitin-proteasome system recruiting domain (URD) that binds to an E2 ubiquitin-conjugating enzyme to enable ubiquitination of the target.

[0285] As disclosed herein, the ubiquitin-proteasome system may be exploited for the directed degradation of desired protein targets. For example, many diseases are associated with the abnormal function and/or expression of certain proteins (e.g., cancer caused by dysfunctional expression or localization of oncogenes). Degradation of said proteins can have a therapeutic effect in treating associated diseases, and the ubiquitin-proteasome system offers a naturally occurring process for effecting said degradation. Furthermore, degradation of disease-associated proteins may be more effective than inhibition of the protein, for example, using a small molecule or antibody composition, as in these cases, the protein is still present within the cell and may perform various biological functions at interfaces other than the inhibited domain, for example scaffolding functions, or contribute to pathology as a result of accumulation, aggregation or mislocalization.

[0286] Several groups have reported on the structure and preclinical activity of various macromolecule degrader formats, including fusion proteins comprising a full-length or truncated E3 ligase and macromolecular targeting constructs. However, general design principles for such macromolecule degraders are not yet well established, comparatively few of the hundreds of naturally occurring E3 ligases have been explored in this context, and degradation of intracellular targets using macromolecule degraders has been demonstrated for only a limited number of target proteins. Furthermore, there is little precedent for the optimization of drug-like properties for such molecules, and none have yet advanced to the stage of clinical testing. Examples of previous macromolecule degraders have been explored in: Wang et al., “The state of the art of PROTAC technologies for drug discovery,” Eur J. Med. Chem. (2022) 235:114290; Lim et al., “bioPROTACs as versatile modulators of intracellular therapeutic targets including proliferating cell nuclear antigen (PCNA),” PNAS (2020) 117 (11): 5791-5800; Hatakeyama et al. “Targeted destruction of c-Myc by an engineered ubiquitin ligase suppresses cell transformation and tumor formation,” Cancer Res. (2005) 65 (17): 7874-9; Portnoff et al. “Ubiquibodies, synthetic E3 ubiquitin ligases endowed with unnatural substrate specificity for targeted protein silencing,” J. Biol. Chem. (2014) 289 (11): 7844-55; Liao et al. “A PROTAC peptide induces durable β-catenin degradation and suppresses Wnt-dependent intestinal cancer.” Cell Discov. (2020) 6:35; Liu et al. Targeted degradation of b-catenin by chimeric F-box fusion proteins. Biochem. and Biophys. Res. Comm. (2004) 313:1023-1029; Cong et al., “A protein knockdown strategy to study the function of β-catenin in tumorigenesis,” BMC Molecular Bio. (2003) 4:10; and Shu et al. “Eradication of pathogenic β-catenin by Skp1/Cullin/F box ubiquitination machinery,” PNAS (2003) 100 (22) 12729-12734; each of which is hereby expressly incorporated by reference in its entirety. Localization of degraders to the correct subcellular compartment may be important for the ability to degrade a target protein, e.g., if the target is localized to the nucleus, or if degradation of target protein only in the nucleus but not cytoplasm is desired. It is noteworthy that apparently none of these references address, or even consider, this potentially important aspect of degrader design.

[0287] Accordingly, in some embodiments provided herein are polypeptides comprising or consisting of a portion derived from a an E3 ubiquitin ligase or viral homolog thereof. In some embodiments, the portion has ubiquitin-proteasome recruiting activity and may be designated as a ubiquitin recruiting domain (URD) In some embodiments provided herein are bifunctional polypeptides comprising these portions. In some embodiments provided herein are bifunctional polypeptides which are engineered (e.g., by modification of an endogenous localization peptide sequence, by adding localization peptide sequences, and/or by selecting a component which has an endogenous localization sequence) to direct the bifunctional polypeptide to a particular subcellular compartment, e.g., the cytoplasm, the nucleus, or both. In some embodiments provided herein are bifunctional polypeptides that promote proteasome-mediated degradation of a target protein, and uses thereof, such as for the treatment of a disease. These bifunctional polypeptides generally comprise a first component that is able to bind to the target protein with specificity, and a second component (URD) that is able to recruit a ubiquitination complex to mark the target protein for proteasomal degradation by ubiquitination. An exemplary schematic for the function of the bifunctional polypeptides disclosed herein may be seen in FIG. 1. FIG. 2 depicts some non-limiting examples of bifunctional polypeptides with various combinations and orientations of targeting moieties and URD, and optionally NLS and linkers (the depiction is in the conventional N-terminal to C-terminal (left to right) orientation). In some embodiments not shown in FIG. 2, an NLS sequence is present at both the N- and C-terminal ends, and each of the NLS shown can represent one, two, three or more copies of the same or a different NLS sequence.

### Portions/URDs of E3 Ubiquitin Ligases and Viral Homologs

[0288] Disclosed herein are polypeptides comprising or consisting of a portion derived from a protein selected from the group consisting of a RING family E3 ubiquitin ligase, a cullin family E3 ubiquitin ligase, a homologous to E6AP carboxyl terminus (HECT) family E3 ubiquitin ligase, and a viral homolog of an E3 ubiquitin ligase. In some embodiments the viral homolog is VIF of HIV-1. In some embodiments, the portion comprises an amino acid substitution (optionally a conservative substitution), addition, and/or deletion to the protein. In some embodiments, the deletion is not an end terminal deletion or truncation of the protein. In some embodiments, the polypeptide and/or the portion is a non-natural polypeptide. In some embodiments, the portion has ubiquitin-proteasome recruiting activity. In some embodiments, the portion is a ubiquitin-proteasome system recruiting domain (URD) that has ubiquitin-proteasome recruiting activity. In some embodiments the portion of E3 ligase or viral homolog is fused to a polypeptide. In some embodiments, the fusion polypeptide comprises a linker, localization sequence (e.g., NLS), targeting moiety, and/or other polypeptide disclosed herein.

[0289] In some embodiments, the portion is derived from an E3 ubiquitin ligase selected from the group consisting of CHIP, DCAF1, E6AP, FBXW7-alpha (also referred to herein as “FBXW7a”), FBXW7-beta (also referred to herein as “FBXW7b”), Keap1, NHLRC1, RNF4, RNF6, RNF11, RNF12, RNF20, RNF25, RNF111, RNF114, RNF115, RNF125, RNF128, RNF138, RNF149, RNF152, RNF165, RNF166, RNF182, SPOP, beta-TRCP, TRIM21, TRIM32, VIF, ZNRF1, ZNRF4, and CBL-b (Y363E). Table I below discloses representative sequences of the preceding. In some embodiments, the portion is selected from the group consisting of CBLb.1, CHIP.1, DCAF1.1, E6AP.1, FBXW7a.1, FBXW7a.2, FBXW7a.3, FBXW7a.4, FBXW7a.5, FBXW7a.6, FBXW7a.7, FBXW7a.8, FBXW7a.9, FBXW7b.1, FBXW7b.2, FBXW7b.3, FBXW7b.4, Keap1.1, NHLRC1.1, NHLRC1.2, NHLRC1.3, NHLRC1.4, NHLRC1.5, RNF4.1, RNF6. 1, RNF6.2, RNF11.1, RNF12.1, RNF 12.2, RNF20.1, RNF25.1, RNF111.1, RNF114.1, RNF115.1, RNF125.1, RNF125.2, RNF125.3, RNF125.4, RNF125.5, RNF125.6, RNF125.7, RNF128.1, RNF138.1, RNF149.1, RNF 152.1, RNF165.1, RNF166.1, RNF182.1, RNF182.2, SPOP.1, SPOP.2, SPOP.3, bTRCP.1, TRIM21.1, TRIM21.2, TRIM21.3, TRIM32.1, VIF.1, ZNRF1.1, and ZNRF4.1. Table 2 below discloses representative sequences of the preceding.

[0290] In some embodiments, the portion is derived from a monomeric RING family E3 ligase. In some embodiments, the portion is derived from a monomeric RING family E3 ligase selected from the group consisting of NHLRC1, RNF11, RNF111, RNF 114, RNF115, RNF12, RNF125, RNF128, RNF138, RNF149, RNF152, RNF165, RNF166, RNF182, RNF20, RNF25, RNF4, RNF6, ZNRF1, ZNRF4, and CBL-b (Y363E). In some embodiments, the portion is derived from a monomeric RING family E3 ligase selected from the group consisting of RNF125, NHLRC1, RNF4, RNF6, RNF12, RNF138 and ZNRF1. In some embodiments, the portion is selected from the group consisting of NHLRC1.1, NHLRC1.2, NHLRC1.3, NHLRC1.4, NHLRC1.5, RNF11.1, RNF111.1, RNF114.1, RNF115.1, RNF12.1, RNF12.2, RNF125.1, RNF125.2, RNF125.3, RNF125.4, RNF125.5, RNF125.6, RNF125.7, RNF128.1, RNF138.1, RNF149.1, RNF1521, RNF1651, RNF1661, RNF182.1, RNF182.2, RNF20.1, RNF25.1, RNF4.1, RNF6.1, RNF6.2, ZNRF1.1, ZNRF4.1, and CBLb.1. In some embodiments, the portion is selected from the group consisting of NHLRC1.1, NHLRC1.2, NHLRC1.3, NHLRC1.4, NHLRC1.5, RNF125.1, RNF125.2, RNF125.3, RNF125.4, RNF125.5, RNF125.6, RNF125.7, RNF4.1, RNF6.1, RNF6.2, RNF 12.1, RNF 12.2, RNF 138.1, and ZNRF1.1.

[0291] In some embodiments, the portion is derived from a cullin family E3 ligase. In some embodiments, the portion is derived from a cullin family E3 ligase selected from the group consisting of DCAF1, beta-TRCP, FBXW7-alpha, FBXW7-beta, Keap1, and SPOP. In some embodiments, the portion is derived from a cullin family E3 ligase selected from the group consisting of beta-TRCP, FBXW7-alpha, and FBXW7-beta. In some embodiments, the portion is selected from the group consisting of DCAF1.1, bTRCP.1, FBXW7a.1, FBXW7a.2, FBXW7a.3, FBXW7a.4, FBXW7a.5, FBXW7a.6, FBXW7a.7, FBXW7a.8, FBXW7a.9, FBXW7b.1, FBXW76.2, FBXW7b.3, FBXW7b.4, Keap1.1, SPOP.1, SPOP.2, and SPOP.3.

[0292] In some embodiments, the number of amino acids in the portion is, is about, or is less than, 80, 75, 70, 65, 60, 65, 50, 45, 40, 35, 30, 25, 20, 15, 10, 5, 4, 3, 2, or 1%, of the number of amino acids in the wild-type full-length protein (e.g sequences disclosed in Table 1), or a range defined by any two of the preceding values, optionally 15-80, 15-50, 25-80, 25-50, 30-60, 1-80, 2-80, 1-70, 2-70, 2-65%. In some embodiments, the number of amino acids in the portion is, or is about 15-50% of the number of amino acids in the wild-type full-length protein. In some embodiments, the number of amino acids in the portion is, or is about, 2-61% of the number of amino acids in the wild-type full-length protein. In some embodiments, the portion is, is about, is less than or equal to 370, 369, 368, 367, 366, 365, 364, 363, 362, 361, 360, 300, 250, 200, 175, 170, 165, 160, 155, 150, 145, 140, 135, 130, 129, 128, 127, 126, 125, 124, 123, 120, 115, 110, 105, 100, 95, 90, 85, 80, 75, 70, 65, 60, 55, 50, 47, 46, 45, 44, 43, 42, 41, 40, 39, 38, 37, 36, 35, 34, 33, 32, 31, 30, 25, or 20 amino acids long, or a range defined by any two of the preceding values. In some embodiments, the portion is, or is about, 20-370, 20-150, 20-100, 20-80, 30-150, 30-100, 50-150 amino acids long. In some embodiments, the portion is, or is about, 50-100 or 20-100 amino acids long. In some embodiments, the portion is, or is about, 40-130 or 44-126 amino acids long.

[0293] In some embodiments, the portion comprises or consists of an amino acid sequence having at least 80%, 85%, 86%, 87%, 88%, 89%, 90%, 91%, 92%, 93%, 94%, 95%, 96%, 97%, 98%, 99%, or 100% sequence identity to any one of SEQ ID NOs: 29-43 and 1836-1895, optionally wherein the portion has ubiquitin-proteasome recruiting activity. In some embodiments, the portion comprises or consists of an amino acid sequence having at least 80%, 85%, 86%, 87%, 88%, 89%, 90%, 91%, 92%, 93%, 94%, 95%, 96%, 97%, 98%, 99%, or 100% sequence identity to any one of SEQ ID NOs: 1858-1888 and 1893-1895, optionally wherein the portion has ubiquitin-proteasome recruiting activity. In some embodiments, the portion comprises or consists of an amino acid sequence having at least 80%, 85%, 86%, 87%, 88%, 89%, 90%, 91%, 92%, 93%, 94%, 95%, 96%, 97%, 98%, 99%, or 100% sequence identity to any one of SEQ ID NOs: 1858-1862, 1867-1875, 1877, 1886-1888, and 1893, optionally wherein the portion has ubiquitin-proteasome recruiting activity. In some embodiments, the portion consists of an amino acid sequence selected from any one of SEQ ID NOs: 1858-1862, 1867-1875, 1877, 1886-1888, and 1893. In some embodiments where the amino acid sequence differs from a recited reference sequence, the difference is the result of the inclusion of one or more modifications relative to the reference sequence. In some embodiments, the one or more modifications comprise a substitution, insertion and/or deletion. In some embodiments, the substitution is a conservative substitution. In some embodiments, the % sequence identity is calculated over the entirety of the reference sequence.

[0294] In some embodiments, the portion comprises an amino acid substitution, addition, and/or deletion to the protein. In some embodiments, the deletion is not an end terminal deletion or truncation of the protein. In some embodiments, the polypeptide and/or the portion is a non-natural polypeptide. In some embodiments, the portion is a ubiquitin-proteasome system recruiting domain (URD) that has ubiquitin-proteasome recruiting activity.

[0295] In some embodiments, disclosed herein are bifunctional polypeptides comprising the polypeptide comprising or consisting of the portion derived from a protein selected from the group consisting of a RING family E3 ubiquitin ligase, a cullin family E3 ubiquitin ligase, a homologous to E6AP carboxyl terminus (HECT) family E3 ubiquitin ligase, and a viral homolog of an E3 ubiquitin ligase, as described in the paragraphs above and elsewhere herein, wherein the bifunctional polypeptide comprises. a) the portion of the protein and, b) a targeting moiety (also referred to as a target “binder” or “binding moiety”) that is capable of binding to a target protein, optionally an intracellular target protein. In some embodiment the targeting moiety binds selectively or specifically to the target protein.

[0296] In some embodiments, disclosed herein are bifunctional polypeptides that promote proteasome-mediated degradation of a target protein. In some embodiments, the bifunctional polypeptide comprises: a) a targeting moiety (also referred to as a target “binder” or “binding moiety”) that is capable of binding to the target protein, optionally an intracellular target protein and, b) a ubiquitin-proteasome system recruiting domain (URD). In some embodiments, proximity of the bifunctional polypeptide to the target protein through binding of the targeting moiety induces ubiquitination of the target protein via the URD, thereby promoting proteasome-mediated degradation of the target protein. In some embodiments the target protein is an intracellular target protein. In some embodiments, the bifunctional polypeptide that promotes proteasome-mediated degradation of a target protein, comprises or consisting of the polypeptide of comprising or consisting of the portion derived from a protein selected from the group consisting of a RING family E3 ubiquitin ligase, a cullin family E3 ubiquitin ligase, a homologous to E6AP carboxyl terminus (HECT) family E3 ubiquitin ligase, and a viral homolog of an E3 ubiquitin ligase, as described in the paragraphs above and elsewhere herein. In some embodiments of the bifunctional polypeptide that promotes proteasome-mediated degradation of a target protein, the URD consists of the URD derived from a protein selected from the group consisting of a RING family E3 ubiquitin ligase, a cullin family E3 ubiquitin ligase, a homologous to E6AP carboxyl terminus (HECT) family E3 ubiquitin ligase, and a viral homolog of an E3 ubiquitin ligase, as described in the paragraphs above and elsewhere herein. In some embodiment the targeting moiety binds selectively or specifically to the target protein.

[0297] Any combination of the targeting moieties and the URD explored herein may be used in the construction of the bifunctional polypeptide.

TABLE 1
Representative E3 ligases and viral
homologs for derivation of portions

| SEQ | E3 | Uniprot | Orientation |
|---|---|---|---|
| ID NO | Ligase | ID | (C-N) |
| 14 | CHIP human full length | Q9UNE7 | SRD-URD |
| 15 | RNF114 human full length | Q9Y508 | URD-SRD |
| 16 | RNF125 human full length | Q96EQ8 | URD-SRD |
| 17 | RNF138 human full length | Q8WVD3 | URD-SRD |
| 18 | RNF166 human full length | Q96A37 | URD-SRD |
| 19 | NHLRC1 human full length | Q6VVB1 | URD-SRD |
| 20 | CBL-b (Y363E) human full length | Q13191 | SRD-URD |
| 21 | TRIM21 human full length | P19474 | URD-SRD |
| 22 | E6AP human full length | Q05086 | SRD-URD |
| 23 | FBXW7 alpha human full length | Q969H0 | URD-SRD |
| 24 | FBXW7 beta human full length | Q969H0 | URD-SRD |
| 25 | beta-TRCP human full length | Q9Y297 | URD-SRD |
| 26 | Keap1 human full length | Q14145 | URD-SRD |
| 27 | SPOP human full length | O43791 | SRD-URD |
| 28 | DCAF1 human full length | Q9Y4B6 | URD-SRD |
| 3240 | RNF4 human full length | P78317 | SRD-URD |
| 3241 | RNF6 human full length | Q9Y252 | SRD-URD |
| 3242 | RNF11 human full length | Q9Y3C5 | SRD-URD |
| 3243 | RNF12 human full length | Q9NVW2 | SRD-URD |
| 3244 | RNF20 human full length | Q5VTR2 | SRD-URD |
| 3245 | RNF25 human full length | Q96BH1 | URD-SRD |
| 3246 | RNF111 human full length | Q6ZNA4 | SRD-URD |
| 3247 | RNF115 human full length | Q9Y4L5 | SRD-URD |
| 3248 | RNF128 human full length | Q8TEB7 | SRD-URD |
| 3249 | RNF149 human full length | Q8NC42 | SRD-URD |
| 3250 | RNF152 human full length | Q8N8N0 | URD-SRD |
| 3251 | RNF165 human full length | Q6ZSG1 | SRD-URD |
| 3252 | RNF182 human full length | Q8N6D2 | URD-SRD |
| 3253 | TRIM32 human full length | Q13049 | URD-SRD |
| 3254 | VIF HIV-1 full length | P12504 | SRD-URD |
| 3255 | ZNRF1 human full length | Q8ND25 | SRD-URD |
| 3256 | ZNRF4 human full length | Q8WWF5 | SRD-URD |

TABLE 2
Exemplary Portions/URDs derived from
E3 ligases and viral homologs

| SEQ | | E3 | Uniprot ID of |
|---|---|---|---|
| ID NO | Name | Family | Parental Protein |
| 1836 | CHIP.1 | U-box | Q9UNE7 |
| 1837 | DCAF1.1 | H-box | Q9Y4B6 |
| 1838 | E6AP.1 | HECT | Q05086 |
| 1839 | bTRCP.1 | F-box/Cull | Q9Y297 |
| 1840 | FBXW7a.1 | F-box/Cul1 | Q969H0 |
| 1841 | FBXW7a.2 | F-box/Cull | Q969H0 |
| 1842 | FBXW7a.3 | F-box/Cull | Q969H0 |
| 1843 | FBXW7a.4 | F-box/Cull | Q969H0 |
| 1844 | FBXW7a.S | F-box/Cull | Q969H0 |
| 1845 | FBXW7a.6 | F-box/Cull | Q969H0 |
| 1846 | FBXW7a.7 | F-box/Cull | Q969H0 |
| 1847 | FBXW7a.8 | F-box/Cull | Q969H0 |
| 1848 | FBXW7a.9 | F-box/Cull | Q969H0 |
| 1849 | FBXW7b.1 | F-box/Cul1 | Q969H0 |
| 1850 | FBXW7b.2 | F-box/Cull | Q969H0 |
| 1851 | FBXW7b.3 | F-box/Cull | Q969H0 |
| 1852 | FBXW7b.4 | F-box/Cull | Q969H0 |
| 1853 | Keap1.1 | BTB/Cul3 | Q14145 |
| 1854 | SPOP.1 | BTB/Cul3 | O43791 |
| 1855 | SPOP.2 | BTB/Cul3 | O43791 |
| 1856 | SPOP.3 | BTB/Cul3 | O43791 |
| 1857 | VIF.1 | BC-Box/Cul5 | P12504 |
| 1858 | NHLRC1.1 | RING | Q6VVB1 |
| 1859 | NHLRC1.2 | RING | Q6VVB1 |
| 1860 | NHLRC1.3 | RING | Q6VVB1 |
| 1861 | NHLRC1.4 | RING | Q6VVB1 |
| 1862 | NHLRC1.5 | RING | Q6VVB1 |
| 1863 | RNF11.1 | RING | Q9Y3C5 |
| 1864 | RNF111.1 | RING | Q6ZNA4 |
| 1865 | RNF114.1 | RING | Q9Y508 |
| 1866 | RNF115.1 | RING | Q9Y4L5 |
| 1867 | RNF12.1 | RING | Q9NVW2 |
| 1868 | RNF12.2 | RING | Q9NVW2 |
| 1869 | RNF125.1 | RING | Q96EQ8 |
| 1870 | RNF125.2 | RING | Q96EQ8 |
| 1871 | RNF125.3 | RING | Q96EQ8 |
| 1872 | RNF125.4 | RING | Q96EQ8 |
| 1873 | RNF125.5 | RING | Q96EQ8 |
| 1874 | RNF125.6 | RING | Q96EQ8 |
| 1875 | RNF125.7 | RING | Q96EQ8 |
| 1876 | RNF128.1 | RING | Q8TEB7 |
| 1877 | RNF138.1 | RING | Q8WVD3 |
| 1878 | RNF149.1 | RING | Q8NC42 |
| 1879 | RNF152.1 | RING | Q8N8N0 |
| 1880 | RNF165.1 | RING | Q6ZSG1 |
| 1881 | RNF166.1 | RING | Q96A37 |
| 1882 | RNF182.1 | RING | Q8N6D2 |
| 1883 | RNF182.2 | RING | Q8N6D2 |
| 1884 | RNF20.1 | RING | QSVTR2 |
| 1885 | RNF25.1 | RING | Q96BH1 |
| 1886 | RNF4.1 | RING | P78317 |
| 1887 | RNF6.1 | RING | Q9Y252 |
| 1888 | RNF6.2 | RING | Q9Y252 |
| 1889 | TRIM21.1 | RING | P19474 |
| 1890 | TRIM21.2 | RING | P19474 |
| 1891 | TRIM21.3 | RING | P19474 |
| 1892 | TRIM32.1 | RING | Q13049 |
| 1893 | ZNRF1.1 | RING | Q8ND25 |
| 1894 | ZNRF4.1 | RING | Q8WWF5 |
| 1895 | CBLb.1 | RING | Q13191 |

[0298] In some embodiments, the component of the bifunctional polypeptide that is capable of recruiting the ubiquitination complex is generally composed of a ubiquitin-proteasome system recruiting domain (URD). In some embodiments, the URD may be derived from an E3 ubiquitin ligase, such as a human E3 ubiquitin ligase. However, in some embodiments, the URD does not strictly need to be derived from an E3 ubiquitin ligase, and may otherwise be derived from other sources, such as viral analogues of E3 ubiquitin ligases that have ubiquitin complex recruitment function (for example, the VIF protein of HIV). The URD may be derived from any of the diverse family of E3 ubiquitin ligases based on factors such as size, localization in the cell (e.g., cytoplasm and/or nucleus), and orientation of the URD domain within the E3 ubiquitin ligase (i.e., if the URD appears N-terminally or C-terminally to the substrate recognition domain). In some embodiments, exemplary URD domains may include, but are not limited to, U-box, RING, HECT, F-box (Cull-SKP1), BTB (Cul3), and H-box (Cul4-DDB1) domains. In some embodiments, exemplary URDs may be derived from E3 ubiquitin ligases including but not limited to CHIP (also termed STUB1), RNF114, RNF125, RNF138, RNF166, NHLRC1, CBL-b (Y363E), TRIM21, E6AP, FBXW7 alpha, FBXW7 beta, beta-TRCP, Keap1, SPOP, or DCAF1. It is envisioned that any truncation or fragment of these E3 ubiquitin ligases that retain ubiquitin-proteasome recruiting activity may be used as a URD in the embodiments herein. In some embodiments, the URD is derived from a RING domain (e.g., RNF114, RNF125, RNF138, RNF166, NHLRC1, CBL-b (Y363E)) or an H-box (Cul4-DDB1) domain (e.g., DCAF1), or any truncation or fragment thereof that retains ubiquitin-proteasome recruiting activity.

[0299] The ubiquitin-proteasome system recruiting domain (URD) should be understood as a protein, or fragment or truncation thereof, that can function to recruit a ubiquitination complex (e.g., can recruit an E2 ubiquitin conjugating enzyme). In some embodiments, the URD is derived from an E3 ubiquitin ligase. In some embodiments, the URD is derived from CHIP, RNF114, RNF125, RNF138, RNF166, NHLRC1, CBL-b (Y363E), TRIM21, E6AP, FBXW7 alpha, FBXW7 beta, beta-TRCP, Keap1, SPOP, or DCAF1, or a truncation or fragment thereof that retains ubiquitin-proteasome recruiting activity. In some embodiments, the URD is selected from a RING domain and an H-box (Cul4-DDB1) domain, or a truncation or fragment thereof that retains ubiquitin-proteasome recruiting activity. In some embodiments, the RING domain is RNF114, RNF125, RNF138, RNF166, NHLRC1, CBL-b (Y363E), or TRIM21. In some embodiments, the H-box domain is DCAF1. In some embodiments, the URD is selected from: the URD derived from a protein which localizes to the cytoplasm; the URD derived from a protein which localizes to the nucleus; and the URD derived from a protein which localizes to the cytoplasm and the nucleus; or a truncation or fragment of the URD that retains ubiquitin-proteasome recruiting activity. In some embodiments, the protein which localizes to the cytoplasm is FBXW7 beta. In some embodiments, the protein which localizes to the nucleus is selected from FBXW7 alpha and SPOP. In some embodiments, the protein which localizes to the cytoplasm and the nucleic is selected from CHIP, RNF114, RNF125, RNF138, RNF166, NHLRC1, CBL-b (Y363E), TRIM21, E6AP, and DCAF1. In some embodiments, the protein is an E3 ubiquitin ligase. In some embodiments, the URD is, is about, is at least, is at least about, is not more than, or is not more than about, 370, 369, 368, 367, 366, 365, 364, 363, 362, 361, 360, 300, 250, 200, 175, 170, 165, 160, 155, 150, 145, 140, 135, 130, 129, 128, 127, 126, 125, 124, 123, 120, 115, 110, 105, 100, 95, 90, 85, 80, 75, 70, 65, 60, 55, 50, 47, 46, 45, 44, 43, 42, 41, 40, 39, 38, 37, 36, 35, 34, 33, 32, 31, 30, 25, or 20 amino acids long, or a range defined by any two of the preceding values, for example, 370-20, 370-120, 120-20, 80-20, or 360-150 amino acids long. In some embodiments, the URD comprises or consists of an amino acid sequence having at least 80%, 85%, 86%, 87%, 88%, 89%, 90%, 91%, 92%, 93%, 94%, 95%, 96%, 97%, 98%, 99%, or 100% sequence identity to any one of SEQ ID NO: 29-43, or a truncation or fragment thereof that retains ubiquitin-proteasome recruiting activity. In some embodiments where the amino acid sequence differs from a recited reference sequence, the difference is the result of the inclusion of one or more modifications relative to the reference sequence. In some embodiments, the one or more modifications comprise a substitution, insertion and/or deletion. In some embodiments, the substitution is a conservative substitution. In some embodiments, the % sequence identity is calculated over the entirety of the reference sequence.

[0300] In some embodiments, the URD is selected from: a URD derived from a protein which localizes to the cytoplasm, optionally selected from FBXW7 beta and Keap1; a URD derived from a protein which localizes to the nucleus, optionally selected from FBXW7 alpha, RNF165, and SPOP; and a URD derived from a protein which localizes to the cytoplasm and the nucleus, optionally selected from beta-TRCP, CHIP, RNF114, RNF125, RNF138, RNF166, NHLRC1, CBL-b (Y363E), TRIM21, E6AP, DCAF1 VIF, RNF11, RNF111, RNF115, RNF12, RNF128, RNF149, RNF152, RNF165, RNF182, RNF20, RNF25, RNF4, RNF6, TRIM32, ZNRF1, ZNRF4.

[0301] Table 2 depicts various E3 ubiquitin ligases and respective URDs embodied herein. In some embodiments of the polypeptide comprising or consisting of a portion derived from a protein, the portion comprises an exemplary URD described below and/or in Table 2. In some embodiments of the bifunctional polypeptide, the bifunctional polypeptide comprises an exemplary URD described below and/or in Table 2.

[0302] One exemplary URD embodied herein is the CHIP URD (CHIP.1) (SEQ ID NO: 29, 1836), which is amino acids 128-303 of the full-length CHIP protein (SEQ ID NO: 14; Uniprot #Q9UNE7; where CHIP is also referred to as STUB1). It is envisioned that alternative portions, fragments, or truncations of the CHIP protein having ubiquitin-proteasome recruiting activity may also be used.

[0303] An additional exemplary URD embodied herein is the DCAF1 URD (DCAF1.1) (SEQ ID NO: 43, 1837), which is amino acids 1045-1079 of the full length DCAF1 protein (SEQ ID NO: 28; Uniprot #Q9Y4B6). It is envisioned that alternative portions, fragments, or truncations of the DCAF1 protein having ubiquitin-proteasome recruiting activity may also be used.

[0304] An additional exemplary URD embodied herein is the E6AP URD (E6AP.1) (SEQ ID NO: 37, 1838), which is amino acids 520-875 of the full length E6AP protein (SEQ ID NO: 22; Uniprot #Q05086). It is envisioned that alternative portions, fragments, or truncations of the E6AP protein having ubiquitin-proteasome recruiting activity may also be used.

[0305] An additional exemplary URD embodied herein is the beta-TRCP URD (bTRCP.1) (SEQ ID NO: 40, 1839), which is amino acids 2-287 of the full length beta-TRCP protein (SEQ ID NO: 25; Uniprot #Q3ULA). It is envisioned that alternative portions, fragments, or truncations of the beta-TRCP protein having ubiquitin-proteasome recruiting activity may also be used.

[0306] An additional exemplary URD embodied herein is the FBXW7 alpha URD (FBXW7a.1) (SEQ ID NO: 38, 1840), which is amino acids 2-368 of the full length FBXW7 alpha protein (SEQ ID NO: 23; Uniprot #Q969H0). Additional URDs derived from FBXW7 alpha are presented in Table 2 (SEQ ID NOs: 1841-1848). It is envisioned that alternative portions, fragments, or truncations of the FBXW7 alpha protein having ubiquitin-proteasome recruiting activity may also be used.

[0307] An additional exemplary URD embodied herein is the FBXW7 beta URD (FBXW7b.1) (SEQ ID NO: 39, 1849), which is amino acids 2-228 of the full length FBXW7 beta protein (SEQ ID NO: 24; Uniprot #Q969H0). Additional URDs derived from FBXW7 beta are presented in Table 2 (SEQ ID NOs: 1850-1852). It is envisioned that alternative portions, fragments, or truncations of the FBXW7 beta protein having ubiquitin-proteasome recruiting activity may also be used.

[0308] An additional exemplary URD embodied herein is the Keap1 URD (Keap1.1) (SEQ ID NO: 41, 1853)), which is amino acids 2-322 of the full length Keap1 protein (SEQ ID NO: 26; Uniprot #Q14145). It is envisioned that alternative portions, fragments, or truncations of the Keap1 protein having ubiquitin-proteasome recruiting activity may also be used.

[0309] An additional exemplary URD embodied herein is the SPOP URD (SPOP.1) (SEQ ID NO: 42, 1854), which is amino acids 147-374 of the full length SPOP protein (SEQ ID NO: 27; Uniprot #043791). Additional URDs derived from SPOP are presented in Table 2 (SEQ ID NOs: 1855-1856). It is envisioned that alternative portions, fragments, or truncations of the SPOP protein having ubiquitin-proteasome recruiting activity may also be used.

[0310] An additional exemplary URD embodied herein is the VIF URD (VIF.1) (SEQ ID NO. 1857)), which is amino acids 116-157 of the full length VIF HV-1 protein (SEQ ID NO: 3254; Uniprot #P12504). It is envisioned that alternative portions, fragments, or truncations of the VIF protein having ubiquitin-proteasome recruiting activity may also be used.

[0311] An additional exemplary URD embodied herein is the NHLRC1 URD (NHLRC1.1) (SEQ ID NO: 34, 1858), which is amino acids 7-98 of the full length NHLRC1 protein (SEQ ID NO: 19; Uniprot #Q6VVB1). Additional URDs derived from NHLRC1 are presented in Table 2 (SEQ ID NOs: 1859-1862). It is envisioned that alternative portions, fragments, or truncations of the NHLRC1 protein having ubiquitin-proteasome recruiting activity may also be used.

[0312] An additional exemplary URD embodied herein is the RNF11 URD (RNF11.1) (SEQ ID NO: 1863), which is amino acids 97-150 of the full length RNF11 protein (SEQ ID NO: 3243; Uniprot #Q9Y3C5). It is envisioned that alternative portions, fragments, or truncations of the RNF11 protein having ubiquitin-proteasome recruiting activity may also be used.

[0313] An additional exemplary URD embodied herein is the RNF111 URD (RNF111.1) (SEQ ID NO: 1864), which is amino acids 934-994 of the full length RNF111 protein (SEQ ID NO: 3246; Uniprot #Q6ZNA4). It is envisioned that alternative portions, fragments, or truncations of the RNF111 protein having ubiquitin-proteasome recruiting activity may also be used.

[0314] An additional exemplary URD embodied herein is the RNF114 URD (RNF114.1) (SEQ ID NO: 30, 1865), which is amino acids 25-119 of the full length RNF114 protein (SEQ ID NO: 15: Uniprot #Q9Y508). It is envisioned that alternative portions, fragments, or truncations of the RNF114 protein having ubiquitin-proteasome recruiting activity may also be used.

[0315] An additional exemplary URD embodied herein is the RNF115 URD (RNF115.1) (SEQ ID NO: 1866), which is amino acids 226-270 of the full length RNF115 protein (SEQ ID NO: 3247; Uniprot #Q9Y4L5) It is envisioned that alternative portions, fragments, or truncations of the RNF115 protein having ubiquitin-proteasome recruiting activity may also be used.

[0316] Additional exemplary URDs embodied herein are the RNF12 URDs (RNF12.1-2) (SEQ ID NOs: 1867-1868), which are amino acids 547-615 and 547-624 of the full length RNF12 protein (SEQ ID NO: 3243; Uniprot #Q9NVW2). It is envisioned that alternative portions, fragments, or truncations of the RNF12 protein having ubiquitin-proteasome recruiting activity may also be used.

[0317] An additional exemplary URD embodied herein is the RNF125 URD (RNF125.1) (SEQ ID NO: 31, 1869), which is amino acids 2-128 of the full length RNF125 protein (SEQ ID NO: 16; Uniprot #Q96EQ8). Additional URDs derived from RNF125 are presented in Table 2 (SEQ ID NOs: 1870-1875). It is envisioned that alternative portions, fragments, or truncations of the RNF125 protein having ubiquitin-proteasome recruiting activity may also be used.

[0318] An additional exemplary URD embodied herein is the RNF128 URD (RNF128.1) (SEQ ID NO: 1876), which is amino acids 274-326 of the full length RNF128 protein (SEQ ID NO: 3248; Uniprot #Q8TEB7). It is envisioned that alternative portions, fragments, or truncations of the RNF128 protein having ubiquitin-proteasome recruiting activity may also be used.

[0319] An additional exemplary URD embodied herein is the RNF138 URD (RNF138.1) (SEQ ID NO: 32, 1877)), which is amino acids 14-113 of the full length RNF 138 protein (SEQ ID NO: 17; Uniprot #Q8WVD3). It is envisioned that alternative portions, fragments, or truncations of the RNF138 protein having ubiquitin-proteasome recruiting activity may also be used.

[0320] An additional exemplary URD embodied herein is the RNF149 URD (RNF149.1) (SEQ ID NO: 1878), which is amino acids 267-311 of the full length RNF149 protein (SEQ ID NO: 3249; Uniprot #Q8NC42). It is envisioned that alternative portions, fragments, or truncations of the RNF 149 protein having ubiquitin-proteasome recruiting activity may also be used.

[0321] An additional exemplary URD embodied herein is the RNF152 URD (RNF152.1) (SEQ ID NO: 1879), which is amino acids 9-55 of the full length RNF152 protein (SEQ ID NO: 3250; Uniprot #Q8N8NO). It is envisioned that alternative portions, fragments, or truncations of the RNF152 protein having ubiquitin-proteasome recruiting activity may also be used.

[0322] An additional exemplary URD embodied herein is the RNF165 URD (RNF165.1) (SEQ ID NO: 1880), which is amino acids 259-339 of the full length RNF165 protein (SEQ ID NO: 3251; Uniprot #Q6ZSG1). It is envisioned that alternative portions, fragments, or truncations of the RNF165 protein having ubiquitin-proteasome recruiting activity may also be used.

[0323] An additional exemplary URD embodied herein is the RNF166 URD (RNF166.1) (SEQ ID NO: 33, 1881), which is amino acids 26-126 of the full length RNF166 protein (SEQ ID NO: 18; Uniprot #Q96A37). It is envisioned that alternative portions, fragments, or truncations of the RNF166 protein having ubiquitin-proteasome recruiting activity may also be used.

[0324] Additional exemplary URDs embodied herein are the RNF182 URDs (RNF182.1-. 2) (SEQ ID NOs: 1882-1883), which are amino acids 19-74 and 17-92 of the full length RNF182 protein (SEQ ID NO: 3252; Uniprot #Q8N6D2). It is envisioned that alternative portions, fragments, or truncations of the RNF182 protein having ubiquitin-proteasome recruiting activity may also be used.

[0325] An additional exemplary URD embodied herein is the RNF20 URD (RNF20.1) (SEQ ID NO: 1884), which is amino acids 906-975 of the full length RNF20 protein (SEQ ID NO: 3244; Uniprot #Q5VTR2). It is envisioned that alternative portions, fragments, or truncations of the RNF20 protein having ubiquitin-proteasome recruiting activity may also be used.

[0326] An additional exemplary URD embodied herein is the RNF25 URD (RNF25.1) (SEQ ID NO: 1885), which is amino acids 129-254 of the full length RNF25 protein (SEQ ID NO: 3245; Uniprot #Q96BH1). It is envisioned that alternative portions, fragments, or truncations of the RNF25 protein having ubiquitin-proteasome recruiting activity may also be used.

[0327] An additional exemplary URD embodied herein is the RNF4 URD (RNF4.1) (SEQ ID NO: 1886), which is amino acids 130-190 of the full length RNF4 protein (SEQ ID NO: 3240; Uniprot #P783 17). It is envisioned that alternative portions, fragments, or truncations of the RNF4 protein having ubiquitin-proteasome recruiting activity may also be used.

[0328] Additional exemplary URDs embodied herein are the RNF6 URDs (RNF6.1-2) (SEQ ID NOs: 1887-1888), which are amino acids 609-677 and 609-685 of the full length RNF6 protein (SEQ ID NO: 3241; Uniprot #Q9Y252). It is envisioned that alternative portions, fragments, or truncations of the RNF6 protein having ubiquitin-proteasome recruiting activity may also be used.

[0329] An additional exemplary URD embodied herein is the TRIM21 URD (SEQ ID NO: 36), which is amino acids 1-277 of the full length TRIM21 protein (SEQ ID NO: 21; Uniprot #P19474). Additional URDs derived from TRIM21 are presented in Table 2 (SEQ ID NOs: 1889-1891). It is envisioned that alternative portions, fragments, or truncations of the TRIM21 protein having ubiquitin-proteasome recruiting activity may also be used.

[0330] An additional exemplary URD embodied herein is the TRIM32 URD (TRIM32.1) (SEQ ID NO: 1892), which is amino acids 7-96 of the full length TRIM32 protein (SEQ ID NO. 3253; Uniprot #Q13049). It is envisioned that alternative portions, fragments, or truncations of the TRIM32 protein having ubiquitin-proteasome recruiting activity may also be used.

[0331] An additional exemplary URD embodied herein is the ZNRF1 URD (ZNRF1.1) (SEQ ID NO: 1893), which is amino acids 142-227 of the full length ZNRF1 protein (SEQ ID NO: 3255; Uniprot #Q8ND25). It is envisioned that alternative portions, fragments, or truncations of the ZNRF1 protein having ubiquitin-proteasome recruiting activity may also be used.

[0332] An additional exemplary URD embodied herein is the ZNRF4 URD (ZNRF4.1) (SEQ ID NO: 1894), which is amino acids 307-354 of the full length ZNRF4 protein (SEQ ID NO: 3256; Uniprot #Q8WWFS). It is envisioned that alternative portions, fragments, or truncations of the ZNRF4 protein having ubiquitin-proteasome recruiting activity may also be used.

[0333] An additional exemplary URD embodied herein is the CBL-b URD (CBLb. 1) (SEQ ID NO: 35, 1895), which is amino acids 349-427 of the full length CBL-b protein (SEQ ID NO: 20; Uniprot #Q13191). It is noted that the CBL-b sequence provided herein harbors a Y363E mutation, which confers constitutive ubiquitin ligase activity. In some embodiments, the Y363E mutation is not present. It is envisioned that alternative portions, fragments, or truncations of the CBL-b protein having ubiquitin-proteasome recruiting activity may also be used.

### Localization Sequences

[0334] Localization of degraders to the correct subcellular compartment may be important for the ability to degrade a target protein, e.g., if the target is localized to the nucleus, or if degradation of target protein only in the nucleus but not cytoplasm is desired. In some embodiments provided herein are polypeptides, or bifunctional polypeptides, which are engineered (e.g., by modification of an endogenous localization peptide sequence, by adding localization peptide sequences, and/or by selecting a component which has an endogenous localization sequence) to direct the polypeptide or bifunctional polypeptide to a particular subcellular compartment, e.g., the cytoplasm, the nucleus, or both.

[0335] In some embodiments, the polypeptide comprising a portion derived from an E3 ligase or viral homolog thereof comprises one or more localization peptide sequences. In some embodiments, the bifunctional polypeptide comprises one or more localization peptide sequences. In some embodiments, the polypeptide comprising a portion, or the bifunctional polypeptide comprises one or more localization peptide sequences that direct the polypeptide or bifunctional polypeptide to a subcellular compartment or compartments, optionally wherein the subcellular compartment is the nucleus and/or the cytoplasm. In some embodiments, the one or more localization peptide sequences direct the polypeptide or bifunctional polypeptide to a desired subcellular compartment or compartments, optionally wherein the one or more localization peptide sequences are selected or designed to direct the polypeptide or bifunctional polypeptide to a desired subcellular compartment or compartments. In some embodiments, the one or more localization peptide sequences comprise or consist of a nuclear localization signal (NLS) peptide and/or a nuclear export signal (NES) peptide. In some embodiments, the bifunctional polypeptide further comprises a nuclear localization signal (NLS) peptide. In some embodiments, the NLS peptide is located at the N-terminus of the bifunctional polypeptide, the C-terminus of the bifunctional polypeptide, or internally within the bifunctional polypeptide. In some embodiments, the NLS signal is an NLS that naturally occurs in one or more of the components of the bifunctional polypeptide, such as an NLS that is naturally found in the targeting moiety and/or URD. For example, the targeting moiety and/or URD of a bifunctional polypeptide may comprise an NLS within their sequence. In some embodiments the NLS is an NLS that is engineered into the bifunctional polypeptide, for example, added N-terminally, C-terminally, or internally within a component of the bifunctional polypeptide, such as the targeting moiety and/or URD. In some embodiments, the NLS peptide comprises or consists of the amino acid sequence of SEQ ID NO: 51. However, other suitable NLS peptides generally known in the art may also be used. In some embodiments the localization sequence is a sequence from Table 3 or 4.

[0336] In some embodiments, the one or more localization peptide sequences comprise or consist of an endogenous localization peptide sequence of the targeting moiety and/or URD. In some embodiments, the one or more localization peptide sequences comprise or consist of an endogenous localization peptide sequence of the URD, for example the localization sequences disclosed in Table 4. In some embodiments, the URD is selected from: a URD derived from a protein which localizes to the cytoplasm, optionally selected from FBXW7 beta and Keap1; a URD derived from a protein which localizes to the nucleus, optionally selected from FBXW7 alpha, RNF165, and SPOP; and a URD derived from a protein which localizes to the cytoplasm and the nucleus, optionally selected from beta-TRCP, CHIP, RNF114, RNF125, RNF138, RNF166, NHLRC1, CBL-b (Y363E), TRIM21, E6AP, DCAF1 VIF, RNF11, RNF111, RNF115, RNF12, RNF128, RNF 149, RNF152, RNF165, RNF182, RNF20, RNF25, RNF4, RNF6, TRIM32, ZNRF1, ZNRF4.

[0337] In some embodiments, the one or more localization peptide sequences comprise or consist of an endogenous localization peptide sequence of the URD and/or targeting moiety that is modified, wherein the modification alters the subcellular compartment or compartments to which the bifunctional polypeptide is directed as compared to the native endogenous localization peptide sequence. In some embodiments, the modification comprises or consists of a substitution, truncation or deletion of an endogenous localization peptide sequence. In some embodiments:
[0338] a. the native endogenous localization peptide sequence directs the polypeptide to the nucleus, and the modified endogenous localization peptide sequence directs the polypeptide to the cytoplasm;
[0339] b. the native endogenous localization peptide sequence directs the polypeptide to the cytoplasm, and the modified endogenous localization peptide sequence directs the polypeptide to the nucleus;
[0340] c. the native endogenous localization peptide sequence directs the polypeptide to the nucleus and the cytoplasm, and the modified endogenous localization peptide sequence directs the polypeptide to only the cytoplasm;
[0341] d. the native endogenous localization peptide sequence directs the polypeptide to the nucleus and the cytoplasm, and the modified endogenous localization peptide sequence directs the polypeptide to only the nucleus;
[0342] e. the native endogenous localization peptide sequence directs the polypeptide to the nucleus, and the modified endogenous localization peptide sequence directs the polypeptide to the nucleus and the cytoplasm; or
[0343] f. the native endogenous localization peptide sequence directs the polypeptide to the cytoplasm, and the modified endogenous localization peptide sequence directs the polypeptide to the nucleus and the cytoplasm.

[0344] In some embodiments, the one or more localization peptide sequences comprises or consists of an endogenous localization peptide sequence of the URD that is modified, wherein the native endogenous localization peptide sequence directs the polypeptide to the nucleus, and the modified endogenous localization peptide sequence directs the polypeptide to the cytoplasm. In some embodiments, the modified endogenous localization peptide sequence comprises or consists of a modified SPOP URD endogenous localization peptide sequence, optionally wherein the URD is SPOP.3.

[0345] In some embodiments, the one or more localization peptide sequences comprise or consist of an exogenous localization peptide sequence. In some embodiments, the one or more localization peptide sequences comprise or consist of an NLS peptide that is or is a derivative of the NLS of MYC, simian virus 40 (SV40), SPOP, nucleoplasmin, 53BP1, Hrp1. In some embodiments, the one or more localization peptide sequences comprise or consists of an NLS sequence disclosed in Table 3. In some embodiments, the one or more localization peptide sequences comprise or consist of an NLS comprising or consisting of an amino acid sequence having at least 80%, 85%, 86%, 87%, 88%, 89%, 90%, 91%, 92%, 93%, 94%, 95%, 96%, 97%, 98%, 99%, or 100% sequence identity to any one of SEQ ID NOs: 1896-1909, or SEQ ID NOs: 1869-1904. In some embodiments where the amino acid sequence differs from a recited reference sequence, the difference is the result of the inclusion of one or more modifications relative to the reference sequence. In some embodiments, the one or more modifications comprise a substitution, insertion and/or deletion. In some embodiments, the substitution is a conservative substitution. In some embodiments, the % sequence identity is calculated over the entirety of the reference sequence.

[0346] In some embodiments, the polypeptide comprising a portion derived from an E3 ligase or viral homolog thereof comprises 2, 3, 4, or more localization peptide sequences, optionally wherein the polypeptide comprises 2, 3, 4 or more copies of the same localization sequence in series. In some embodiments, the bifunctional polypeptide comprises 2, 3, 4, or more localization peptide sequences, optionally wherein the bifunctional polypeptide comprises 2, 3, 4 or more copies of the same localization sequence in series. In some embodiments, the polypeptide or the bifunctional polypeptide comprises one or more localization peptide sequences located at a location selected from the group consisting of: the N-terminus of the bifunctional polypeptide; the C-terminus of the bifunctional polypeptide; internally within the bifunctional polypeptide; as part of the URD, optionally an endogenous portion of the URD; as a part of the targeting moiety, optionally an endogenous portion of the URD; and a combination of any of the foregoing. In some embodiments, a first localization peptide sequence is located at the N-terminus of the polypeptide or the bifunctional polypeptide and a second localization peptide sequence is located at the C-terminus of the polypeptide or the bifunctional polypeptide.

TABLE 3
Exemplary NLS sequences

| SEQ | | Parental | Uniprot ID of |
|---|---|---|---|
| ID NO | Name | Protein | Parental Protein |
| 1896 | spNLS.2 | SPOP | O43791 |
| 1897 | spNLS | SPOP | O43791 |
| 1898 | hrpNLS | Hrp1 | Q99383 |
| 1899 | bpNLS | 53BP1 | Q12888 |
| 1900 | nlpNLS | Nucleoplasmin | P05221 |
| 1901 | 3x(svNLS) | Large T antigen (SV40) | P03070 |
| 1902 | 3x(mycNLS) | MYC | P01106 |
| 1903 | svNLS | Large T antigen (SV40) | P03070 |
| 1904 | mycNLS | MYC | P01106 |

TABLE 4
Exemplary URD endogenous NLS/NES sequences

| SEQ | | NLS or | E3 | Parental | Uniprot ID of |
|---|---|---|---|---|---|
| ID NO | Name | NES | Family | protein | Parental Protein |
| 1905 | CHIP.NLS | NLS | U-box | CHIP | Q9UNE7 |
| 1906 | SPOP.NLS | NLS | BTB/Cul3 | SPOP | O43791 |
| 1907 | RNF165.NLS | NLS | RING | RNF165 | Q6ZSG1 |
| 1908 | FBXW7a.NLS | NLS | F-box/Cull | FBXW7a | Q969H0 |
| 1909 | NHLRC1.NLS | NLS | RING | NHLRC1 | Q6VVB1 |
| 1910 | NHLRC1.NES | NES | RING | NHLRC1 | Q6VVB1 |
| 1911 | E6AP.NES | NES | HECT | E6AP | Q05086 |
| 1912 | Keap1.NES | NES | BTB/Cul3 | Keap1 | Q14145 |
| 1913 | RNF12.NES | NES | RING | RNF12 | Q9NVW2 |
| 1914 | RNF138.NES | NES | RING | RNF138 | Q8WVD3 |
| 1915 | RNF166.NES | NES | RING | RNF166 | Q96A37 |
| 1916 | TRIM21.NES | NES | RING | TRIM21 | P19474 |
| 1917 | TRIM32.NES | NES | RING | TRIM32 | Q13049 |

### Bifunctional Polypeptides: General Characteristics

[0347] The following characteristics may apply to embodiments of the bifunctional polypeptides disclosed herein. In some embodiments, the bifunctional polypeptide comprises a targeting moiety (also referred to as a target “binder” or “binding moiety”) that is capable of binding to the target protein. In some embodiment the targeting moiety binds selectively or specifically to the target protein. In some embodiments, the targeting moiety is, or is less than, 260, 259, 258, 257, 256, 255, 254, 253, 252, 251, 250, 245, 240, 235, 230, 225, 220, 215, 210, 205, 200, 195, 190, 185, 180, 175, 170, 165, 160, 155, 150, 145, 140, 135, 130, 129, 128, 127, 126, 125, 124, 123, 122, 121, 120, 119, 118, 117, 116, 115, 114, 113, 112, 110, 109, 108, 107, 106, 105, 104, 103, 102, 101, 100, 99, 98, 97, 96, 95, 94, 93, 92, 91, 90, 89, 88, 87, 86, 85, 84, 83, 82, 81, 80, 75, 70, 65, 60, 55, 54, 53, 54, 53, 52, 51, 50, 49, 48, 47, 46, 45, 44, 43, 42, 41, 40, 39, 38, 37, 36, 35, 34, 33, 32, 31, 30, 29, 28, 27, 26, 25, 24, 23, 22, 21, 20, 19, 18, 17, 16, 15, 14, 13, 12, 11, or 10 amino acids long, or a range defined by any two of the preceding values, optionally 10-260, 10-200, 10-130, 25-260, 25-200, 25-130, 35-260, 35-200, 35-130, 50-260, 50-200, or 50-130 amino acids long. In some embodiments, the targeting moiety comprises or consists of an endogenous binding partner of the target protein, an antibody, Fab, F(ab′)₂, Fab′, scFv, single domain antibody (sdAb), V_{H} domain, V_{L}, domain, V_{H}H, V_{NAR}, diabody, intrabody, DARPin, monobody, affibody, avimer, or any binding fragment or derivative thereof.

[0348] In some embodiments, the targeting moiety comprises or consists of an endogenous protein binding partner of the target protein, a fragment and/or a derivative thereof. In some embodiments, the targeting moiety is, or is less than, 100, 99, 98, 97, 96, 95, 94, 93, 92, 91, 90, 89, 88, 87, 86, 85, 84, 83, 82, 81, 80, 75, 70, 65, 60, 55, 54, 53, 54, 53, 52, 51, 50, 49, 48, 47, 46, 45, 44, 43, 42, 41, 40, 39, 38, 37, 36, 35, 34, 33, 32, 31, 30, 29, 28, 27, 26, 25, 24, 23, 22, 21, 20, 19, 18, 17, 16, 15, 14, 13, 12, 11, or 10 amino acids long, or a range defined by any two of the preceding values. In some embodiments, the targeting moiety is 10-100, 10-25, 14-100, 14-25, 30-100, 30-50, 30-45, or 80-100 amino acids long.

[0349] In some embodiments, the targeting moiety comprises or consists of a sdAb. In some embodiments, the targeting moiety comprises or consists of either a V_{H} domain or a V_{L} domain of an IgG antibody. In some embodiments, the targeting moiety comprises or consists of a V_{H}H, V_{H}, or V_{NAR} domain of a heavy chain antibody (HcAb). In some embodiments, the targeting moiety comprises or consists of a V_{H}H or V_{L} domain. In some embodiments, the targeting moiety comprises or consists of a sdAb and the targeting moiety is, or is less than, 170, 165, 160, 155, 150, 145, 140, 135, 130, 129, 128, 127, 126, 125, 124, 123, 122, 121, 120, 119, 118, 117, 116, 115, 114, 113, 112, 110, 109, 108, 107, 106, 105, 104, 103, 102, 101, 100, 99, 98, 97, 96, 95, 94, 93, 92, 91, or 90, amino acids long, or a range defined by any two of the preceding values, optionally 90-150, 90-130, 110-150, 110-130, 110-125, or 114-124 amino acids long. In some embodiments, the targeting moiety comprises or consists of an scFv. In some embodiments, the targeting moiety comprises or consists of an scFv targeting moiety is, or is less than, 260, 259, 258, 257, 256, 255, 254, 253, 252, 251, 250, 245, 240, 235, 230, 225, 220, 215, 210, 205, 200, 195, or 190 amino acids long, or a range defined by any two of the preceding values, optionally 190-260, 200-260, or 230-260 amino acids long.

[0350] In some embodiments, the targeting moieties and/or bifunctional polypeptide of the present disclosure have an equilibrium dissociation constant of less (that is superior binding) than about 10⁻⁷ or 10⁻⁸ M, for example, less than about 10⁻⁹ M or 10⁻¹⁰ M, in some embodiments, less than about 10⁻¹¹ M, 10⁻¹² M, or 10⁻¹³ M. In some embodiments, the targeting moiety binds selectively to the target protein. In some embodiments, the targeting moiety binds specifically to the target protein.

[0351] In some embodiments, the targeting moiety is generally any protein that is able to bind to the target protein with specificity. In some embodiments, the targeting moiety is an endogenous binding partner of the target protein, antibody, Fab, F(ab′)₂, Fab′, scFv, sdAb, V_{H} domain, V_{L}, domain, V_{H}H, V_{NAR}, diabody, intrabody, DARPin, monobody, affibody, avimer, or any fragment or derivative thereof, or any other suitable targeting moiety generally known in the art. In some embodiments, the targeting moiety is, is about, is at least, is at least about, is not more than, or is not more than about, 260, 259, 258, 257, 256, 255, 254, 253, 252, 251, 250, 245, 240, 235, 230, 225, 220, 215, 210, 205, 200, 195, 190, 185, 180, 175, 170, 165, 160, 155, 150, 145, 140, 135, 130, 129, 128, 127, 126, 125, 124, 123, 122, 121, 120, 119, 118, 117, 116, 115, 114, 113, 112, 110, 109, 108, 107, 106, 105, 104, 103, 102, 101, 100, 99, 98, 97, 96, 95, 94, 93, 92, 91, 90, 89, 88, 87, 86, 85, 84, 83, 82, 81, 80, 75, 70, 65, 60, 55, 54, 53, 54, 53, 52, 51, 50, 49, 48, 47, 46, 45, 44, 43, 42, 41, 40, 39, 38, 37, 36, 35, 34, 33, 32, 31, 30, 29, 28, 27, 26, 25, 24, 23, 22, 21, 20, 19, 18, 17, 16, 15, 14, 13, 12, 11, or 10 amino acids long, or a range defined by any two of the preceding values, for example, 260-10, 260-120, 120-10, 60-10, or 250-50 amino acids long.

### Exemplary Targets of Bifunctional Polypeptides

[0352] In some embodiments, the target protein is generally a protein that is involved in disease pathology, for example, cancer. In some embodiments, the disease or pathology is a neurodegenerative disease. In some embodiments, the bifunctional polypeptide comprises a targeting moiety that is capable of binding (optionally selectively or specifically) to target protein selected from MYC, (optionally c-MYC), beta catenin I (CTNNB1), forkhead box P3 (FOXP3), proliferating cell nuclear antigen (PCNA), and huntingtin (HTT). In some embodiments, the bifunctional polypeptide targets a protein selected from MYC, (optionally c-MYC), CTNNB1, FOXP3, and HTT. In some embodiments, the target protein is a wild-type and/or a mutant form of the target protein, optionally wherein the targeting moiety preferentially or selectively binds the mutant form of the target protein relative to the wild-type form of the target protein. In some embodiments, the mutant form of the target protein is CTNNB1 (SEQ ID NO: 3) comprising one or more mutations selected from: D32Y; D32N; D32V; D32G; S33Y; S33L; S33F; S33C; S33P, G34V; G34E; 135S, H36P; S37C; S37P; S37P and D207G; T41A; T41I; T42_K49del; S45F and Y670X wherein X indicates termination; S45C; S45F, S45P; S4SY; and S45del. In some embodiments, the mutant form of the target protein is HTT (SEQ ID NO: 2) comprising a polyglutamine expansion, optionally at least 36 amino acids long.

[0353] In some embodiments, the targeting moiety binds, or binds at least in part, to at least a portion of: a) the DNA binding domain of MYC; b) the armadillo domain of CTNNB1; c) the DNA binding domain of FOXP3; or d) the portion of HTT that is encoded by exon 1 of the HTT gene. In some embodiments, the targeting moiety binds, or binds at least in part, to at least a portion of the target protein selected from the portion consisting of:
[0354] a) amino acids 54-406 of MYC (SEQ ID NO: 1),
[0355] b) amino acids 354-406 of MYC (SEQ ID NO: 1),
[0356] c) amino acids 408-437 of MYC (SEQ ID NO: 1),
[0357] d) amino acids 410-419 of MYC (SEQ ID NO: 1),
[0358] e) amino acids 337-423 of FOXP3 (SEQ ID NO: 8),
[0359] f) amino acids 284-304 of FOXP3 (SEQ ID NO: 8),
[0360] g) amino acids 1-88 of HTT (SEQ ID NO: 2) or an analogous region in pathological forms of HTT,
[0361] h) amino acids 1-20 of HTT (SEQ ID NO: 2),
[0362] i) amino acids 1-17 of HTT (SEQ ID NO: 2),
[0363] j) the poly-glutamine (polyQ) tract of HTT, optionally amino acids 18-38 of HTT (SEQ ID NO: 2) or an analogous region in pathological forms of HTT,
[0364] k) the proline rich region (PRR) of HTT, optionally amino acids 39-76 of HTT (SEQ ID NO: 2) or an analogous region in pathological forms of HTT,
[0365] l) amino acids 150-663 of CTNNB1 (SEQ ID NO: 3),
[0366] m) amino acids 15-29 of CTNNB1 (SEQ ID NO: 3), and
[0367] n) amino acids 249-265, 292-306, 379-390, 415-429, 462-470, or 505-519, or any combination thereof, of CTNNB1 (SEQ ID NO: 3).

[0368] In some embodiments, the targeting moiety binds, or binds at least in part, to at least a portion of the target protein selected from the portion consisting of amino acids 38-48, 123-129, or 251-257 or any combination thereof, of PCNA (SEQ ID NO: 3239).

[0369] In some embodiments, the targeting moiety is selected from Omomyc, FOXP3 DNA binding domain (FOXP3DBD), FOXP3, VL12.3, INT41, TCF4, TCF4.1, TCF4.2, TCF4.3, TCF4.4, TCF4.5, TCF4.6, TCF4.7, TCF4.8, TCF4.9, TCF4.10, TCF4.11, TCF4.12, TCF4.13, TCF4.14, TCF4.15, TCF4.16, con1.1, con1.2, p21.1, p21.2, p21.3, p21.4, p21.5, p21.6, p21.7, p21.8, p21.9, mycV.0300, mycV.1300, mycV.1500, mycV.3700, mycV.6600, mycV.1516, mycV.1515, mycV.1514, mycV.1513, mycV.1512, mycV.1511, mycV.1510, mycV.1509, mycV.1508, mycV.1507, mycV.1506, mycV.1505, mycV.1504, mycV.1503, mycV.1502, mycV.1501, or a fragment thereof that is capable of binding to the target protein. In some embodiments, the targeting moiety does not comprise full length or unmodified con 1 or p21. Exemplary sequences of targeting moieties are found in Table 5. In some embodiments, the targeting moiety comprises or consists of an amino acid sequence having at least 80%, 85%, 86%, 87%, 88%, 89%, 90%, 91%, 92%, 93%, 94%, 95%, 96%, 97%, 98%, 99%, or 100% sequence identity to any one of SEQ ID NOs: 6-12, 1918, 1926, 1934, 1942, 1950, 1958, 1966, 1974, 1982, 1990, 1998, 2006, 2014, 2022, 2030, 2038, 2046, 2054, 2062, 2070, 2078, 2086, 2087, 2095 and 2111-2137. In some embodiments where the amino acid sequence differs from a recited reference sequence, the difference is the result of the inclusion of one or more modifications relative to the reference sequence. In some embodiments, the one or more modifications comprise a substitution, insertion and/or deletion. In some embodiments, the substitution is a conservative substitution. In some embodiments, the % sequence identity is calculated over the entirety of the reference sequence.

[0370] FIG. 6 discloses embodiments of bifunctional polypeptides. The description identifies the elements of the polypeptide in the N- to C-terminal direction. In some embodiments, the bifunctional polypeptide is one of the embodiments described in FIG. 6. In some embodiments, the bifunctional polypeptide comprises the embodiments in FIG. 6 sharing one or more elements or features. In some embodiments the shared element or feature is the target. In some embodiments the shared element or feature is the URD name (e.g., those in Table 2. In some embodiments the shared element or feature is protein from which the URD is derived (e.g., those listed in Table 1). In some embodiments the shared element or feature is one or more of the following: the target; the protein from which the URD is derived; the URD name; the type of targeting moiety (e.g., sdAb, scFv, polypeptide binder); the targeting moiety name (e.g., those in Table 5; note that “full” is not included in the names in FIG. 6); the NLS name (e.g. those in Tables 3 and 4); the linker name (e.g., those in Table 26); the position of the URD relative to the targeting moiety (upstream or downstream); and both the URD name and targeting moiety name. In some embodiments, the HA tag sequence (SEQ ID NO: 50) is excluded. In some embodiments, the bifunctional polypeptide comprises or consists of an amino acid sequence having at least 80%, 85%, 86%, 87%, 88%, 89%, 90%, 91%, 92%, 93%, 94%, 95%, 96%, 97%, 98%, 99%, or 100% sequence identity to any one of SEQ ID NOs: 2177-2328 and 2331-3238, In some embodiments, the bifunctional polypeptide comprises or consists of an amino acid sequence of any one of SEQ ID NOs: 2177-2328 and 2331-3238. In some embodiments, the bifunctional polypeptide comprises or consists of an amino acid sequence having at least 80%, 85%, 86%, 87%, 88%, 89%, 90%, 91%, 92%, 93%, 94%, 95%, 96%, 97%, 98%, 99%, or 100% sequence identity to any one of SEQ ID NOs: 2177-2328 and 2331-3238, optionally wherein the sequence lacks the HA tag sequence (SEQ ID NO: 50). In some embodiments where the amino acid sequence differs from a recited reference sequence, the difference is the result of the inclusion of one or more modifications relative to the reference sequence. In some embodiments, the one or more modifications comprise a substitution, insertion and/or deletion. In some embodiments, the substitution is a conservative substitution. In some embodiments, the % sequence identity is calculated over the entirety of the reference sequence.

[0371] Provided below are tables listing the results of HiBiT™ degradation studies utilizing exemplary embodiments of bifunctional polypeptides disclosed herein (Tables 7-9, 11-15, 17-18, 20-21, 23-25). The tables list a “Grade” of A, B, C or D. Details regarding the experimental protocol are provided in the Examples section below. In some embodiments, the bifunctional polypeptide comprises or consists of an amino acid sequence having at least 80%, 85%, 86%, 87%, 88%, 89%, 90%, 91%, 92%, 93%, 94%, 95%, 96%, 97%, 98%, 99%, or 100% sequence identity to any one of the SEQ ID NOs in any of the Tables disclosing Grade A (Tables 7, 11, 17 and 23), Grade B (Tables 8, 12, 14, 18, 20, and 24), and/or Grades C and D (Tables 9, 13, 15, 21 and 25), optionally excluding any one of the SEQ ID NOs having a Grade of D, optionally wherein the sequence lacks the HA tag sequence (SEQ ID NO: 50). In some embodiments, the bifunctional polypeptide comprises or consists of an amino acid sequence having at least 80%, 85%, 86%, 87%, 88%, 89%, 90%, 91%, 92%, 93%, 94%, 95%, 96%, 97%, 98%, 99%, or 100% sequence identity to any one of the SEQ ID NOs in any of the Tables disclosing Grade A (Tables 7, 11, 17 and 23), optionally wherein the sequence lacks the HA tag sequence (SEQ ID NO: 50). In some embodiments, the bifunctional polypeptide comprises or consists of an amino acid sequence of any one of the SEQ ID NOs in the Tables disclosing Grade A (Tables 7, 11, 17 and 23) and/or Grade B (Tables 8, 12, 14, 18, 20, and 24), optionally wherein the sequence lacks the HA tag sequence (SEQ ID NO: 50). In some embodiments, the bifunctional polypeptide does not comprise or consist of an amino acid sequence of any one of the SEQ ID NOs in Tables disclosing Grades C and D (Tables 9, 13, 15, 21 and 25) having a Grade of C and/or D, optionally wherein the sequence lacks the HA tag sequence (SEQ ID NO: 50). In some embodiments, the bifunctional polypeptide further shares one or more elements of features as described above and elsewhere herein. In some embodiments where the amino acid sequence differs from a recited reference sequence, the difference is the result of the inclusion of one or more modifications relative to the reference sequence. In some embodiments, the one or more modifications comprise a substitution, insertion and/or deletion. In some embodiments, the substitution is a conservative substitution. In some embodiments, the % sequence identity is calculated over the entirety of the reference sequence.

TABLE 5
Exemplary targeting moieties

| Target | Class | Name | SEQ ID NO |
|---|---|---|---|
| MYC | sdAb | mycV.0300 full | 1918 |
| MYC | sdAb | mycV.1300 full | 1926 |
| MYC | sdAb | mycV.1500 full | 1934 |
| MYC | sdAb | mycV.3700 full | 1942 |
| MYC | sdAb | mycV.6600 full | 1950 |
| MYC | sdAb | mycV.1516 full | 1958 |
| MYC | sdAb | mycV.1515 full | 1966 |
| MYC | sdAb | mycV.1514 full | 1974 |
| MYC | sdAb | mycV.1513 full | 1982 |
| MYC | sdAb | mycV.1512 full | 1990 |
| MYC | sdAb | mycV.1511 full | 1998 |
| MYC | sdAb | mycV.1510 full | 2006 |
| MYC | sdAb | mycV.1509 full | 2014 |
| MYC | sdAb | mycV.1508 full | 2022 |
| MYC | sdAb | mycV.1507 full | 2030 |
| MYC | sdAb | mycV.1506 full | 2038 |
| MYC | sdAb | mycV.1505 full | 2046 |
| MYC | sdAb | mycV.1504 full | 2054 |
| MYC | sdAb | mycV.1503 full | 2062 |
| MYC | sdAb | mycV.1502 full | 2070 |
| MYC | sdAb | mycV.1501 full | 2078 |
| MYC | peptide | OMOMYC | 2086 |
| mHTT | VL | VL12.3 full | 2087 |
| mHTT | scFv | INT41 full | 2095 |
| FOXP3 | peptide | FOXP3 DBD | 2111 |
| CTNNB1 | peptide | TCF4.1 | 2112 |
| CTNNB1 | peptide | TCF4.10 | 2113 |
| CTNNB1 | peptide | TCF4.11 | 2114 |
| CTNNB1 | peptide | TCF4.12 | 2115 |
| CTNNB1 | peptide | TCF4.14 | 2116 |
| CTNNB1 | peptide | TCF4.15 | 2117 |
| CTNNB1 | peptide | TCF4.16 | 2118 |
| CTNNB1 | peptide | TCF4.2 | 2119 |
| CTNNB1 | peptide | TCF4.3 | 2120 |
| CTNNB1 | peptide | TCF4.4 | 2121 |
| CTNNB1 | peptide | TCF4.5 | 2122 |
| CTNNB1 | peptide | TCF4.6 | 2123 |
| CTNNB1 | peptide | TCF4.7 | 2124 |
| CTNNB1 | peptide | TCF4.8 | 2125 |
| CTNNB1 | peptide | TCF4.9 | 2126 |
| PCNA | peptide | con1.1 | 2127 |
| PCNA | peptide | con1.2 | 2128 |
| PCNA | peptide | p21.1 | 2129 |
| PCNA | peptide | p21.2 | 2130 |
| PCNA | peptide | p21.3 | 2131 |
| PCNA | peptide | p21.4 | 2132 |
| PCNA | peptide | p21.5 | 2133 |
| PCNA | peptide | p21.6 | 2134 |
| PCNA | peptide | p21.7 | 2135 |
| PCNA | peptide | p21.8 | 2136 |
| PCNA | peptide | p21.9 | 2137 |

### Exemplary Bifunctional Degraders Targeting CTNNB1

[0372] In some embodiments, the target protein is beta catenin 1 (CTNNB1). In some embodiments, the CTNNB1 is a mutant form. An example sequence for CTNNB1 is provided as SEQ ID NO: 3 (Uniprot #P35222). CTNNB1 is involved in the pathology of various solid tumors (including but not limited to liver metastases, colorectal carcinoma, or other gastrointestinal cancers) and hematological malignancies. In some embodiments disclosed herein, the bifunctional polypeptide comprises a targeting moiety that is capable of binding to CTNNB1. Some examples of targeting moieties that target CTNNB1 include TCF4 (SEQ ID NO: 12; Uniprot #Q9NQBO), and amino acids 10-54 of TCF4 (SEQ ID NO: 11), although other suitable CTNNB1 targeting moieties generally known in the art may also be used. In some embodiments, the targeting moieties that are capable of binding to CTNNB1 may be capable of binding, or binding at least in part, to at least a portion of CTNNB1, such as the armadillo domain of CTNNB1. In some embodiments, the targeting moieties that are capable of binding to CTNNB1 are capable of binding, or binding at least in part, to at least a portion of amino acids 150-663 (the armadillo domain of CTNNB1; as seen in PDB: 2GL7), amino acids 15-29 (binding epitope of antibody BC2), or amino acids 249-265, 292-306, 379-390, 415-429, 462-470, or 505-519, (which are residues in the armadillo domain that interact with TCF4, E-cadherin, Axin, APC, TCF/LEF family transcription factors and/or SOX9) or any combination thereof, of CTNNB1 (as represented as SEQ ID NO: 3). The bifunctional polypeptides disclosed herein that are specific for CTNNB1 may be used for the treatment of a cancer, for example, a cancer involving nuclear expression of beta-catenin and/or harboring mutations or alterations in the Wnt/beta-catenin signaling pathway, for example, solid tumors (including but not limited to liver metastases, colorectal carcinoma, or other gastrointestinal cancers) and hematological malignancies.

[0373] In some embodiments, the CTNNB1 target protein is a mutant form of CTNNB1 (SEQ ID NO: 3) comprising one or more mutations selected from: D32Y; D32N; D32V; D32G; S33Y; S33L; S33F; S33C; S33P; G34V; G34E; 135S; H36P; S37C; S37P; S37P and D207G; T41A; T41I; T42_K49del; S45F and Y670X wherein X indicates termination; S45C; S45F; S45P; S45Y; and S45del.

[0374] In some embodiments, the bifunctional polypeptide targeting CTNNB1 comprises a localization peptide sequence which directs the bifunctional polypeptide to the nucleus of a cell. In some embodiments, the localization peptide sequence comprises or consists of a NLS sequence selected from the group of the NLS sequences of MYC, SPOP, Hrp1, SV40, 53BP1, and nucleoplasmin. In some embodiments, the localization peptide sequence comprises or consists of a NLS sequence selected from the group of the NLS sequence of MYC, SPOP, and Hrp1. In some embodiments, the NLS comprises or consists of a sequence selected from any one of SEQ ID NOs: 1896-1904. In some embodiments, the NLS comprises or consists of a sequence selected from any one of SEQ ID NOs: 1896-1898, 1902 and 1904.

[0375] In some embodiments, the bifunctional polypeptide targeting CTNNB1 comprises a URD derived from a URD selected from the group consisting of CBL-b (Y363E), CHIP, DCAF1, E6AP, FBXW7-alpha, Keap1, NHLRC1, RNF4, RNF12, RNF114, RNF125, RNF138, RNF 166, SPOP, beta-TRCP, TRIM21, and VIF. In some embodiments, the URD is a truncation or fragment thereof that retains ubiquitin-proteasome recruiting activity. In some embodiments, the URD is derived from NHLRC1, RNF125, or SPOP. In some embodiments, the URD is truncation or fragment thereof that retains ubiquitin-proteasome recruiting activity. In some embodiments, the URD comprises or consists of a sequence selected from any one of SEQ ID NOs: 1836-1848, 1853-1862, 1865, 1867-1875, 1877, 1881, 1889-1891, and 1895. In some embodiments, the URD comprises or consists of a sequence selected from any one of SEQ ID NOs: 1858-1862, 1869-1875, and 1854-1856. In some embodiments, the URD comprises or consists of CBLb.1, CHIP.1, DCAF1.1, E6AP.1, FBXW7a.1, Keap1.1, NHLRC1.1, NHLRC1.2, NHLRC1.3, RNF4.1, RNF12.2, RNF114.1, RNF125.1, RNF125.2, RNF138.1, RNF166.1, SPOP. 1, bTRCP. 1, TRIM21 1, or VIF.1. In some embodiments, the URD comprises or consists of NHLRC1.1, NHLRC1.2, NHLRC1.3, RNF125.1, RNF125.2, or SPOP.1. In some embodiments, the URD comprises or consists of a sequence selected from any one of SEQ ID NOs: 1836-1840, 1853-1854, 1857, 1858-1860, 1865, 1868-1870, 1877, 1881, 1886, 1889, and 1895. In some embodiments, the URD comprises or consists of a sequence selected from any one of SEQ ID NOs: 1854, 1858-1860, and 1869-1870.

[0376] In some embodiments, the bifunctional polypeptide targeting CTNNB1 comprises a targeting moiety wherein the targeting moiety comprises or consists of a targeting moiety disclosed in Table 6. In some embodiments, the targeting moiety comprises or consists of an endogenous protein binding partner of the target protein, a fragment and/or a derivative thereof. In some embodiments, In some embodiments, the targeting moiety comprises or consists of TCF4.1, TCF4.2, TCF4.3, TCF4.4, TCF4.5, TCF4.6, TCF4.7, TCF4.8, TCF4.9, TCF4.10, TCF4.11, TCF4.12, TCF4.13, TCF4.14, TCF4.15, or TCF4.16, or a fragment thereof that is capable of binding to the target protein. In some embodiments, the targeting moiety comprises or consists of an amino acid sequence having at least 80%, 85%, 86%, 87%, 88%, 89%, 90%, 91%, 92%, 93%, 94%, 95%, 96%, 97%, 98%, 99%, or 100% sequence identity to any one of SEQ ID NOs. 2112-2126. In some embodiments where the amino acid sequence differs from a recited reference sequence, the difference is the result of the inclusion of one or more modifications relative to the reference sequence. In some embodiments, the one or more modifications comprise a substitution, insertion and/or deletion. In some embodiments, the substitution is a conservative substitution. In some embodiments, the % sequence identity is calculated over the entirety of the reference sequence.

[0377] In some embodiments, the bifunctional polypeptide targeting CTNNB1 comprises or consists of an amino acid sequence having at least 80%, 85%, 86%, 87%, 88%, 89%, 90%, 91%, 92%, 93%, 94%, 95%, 96%, 97%, 98%, 99%, or 100% sequence identity to any one of SEQ ID NOs: 2177-2328, and 2331-2475, optionally wherein the sequence lacks the HA tag sequence (SEQ ID NO: 50). In some embodiments, the bifunctional polypeptide comprises or consists of an amino acid sequence having at least 80%, 85%, 86%, 87%, 88%, 89%, 90%, 91%, 92%, 93%, 94%, 95%, 96%, 97%, 98%, 99%, or 100% sequence identity to any one of the SEQ ID NOs in Table 7, 8 and/or 9, optionally excluding any one of the SEQ ID NOs having a Grade of D, optionally wherein the sequence lacks the HA tag sequence (SEQ ID NO: 50). In some embodiments, the bifunctional polypeptide comprises or consists of an amino acid sequence of any one of the SEQ ID NOs in Table 7 and/or 8, optionally wherein the sequence lacks the HA tag sequence (SEQ ID NO: 50). In some embodiments, the bifunctional polypeptide does not comprise or consist of an amino acid sequence of any one of the SEQ ID NOs in Table 9 disclosing Grades C and D (Tables 9, 13, 15, 21 and 25) having a Grade of C and/or D, optionally wherein the sequence lacks the HA tag sequence (SEQ ID NO: 50). In some embodiments where the amino acid sequence differs from a recited reference sequence, the difference is the result of the inclusion of one or more modifications relative to the reference sequence. In some embodiments, the one or more modifications comprise a substitution, insertion and/or deletion. In some embodiments, the substitution is a conservative substitution. In some embodiments, the % sequence identity is calculated over the entirety of the reference sequence.

[0378] In some embodiments, the target protein is CTNNB1. In some embodiments, the URD is the URD of CHIP, DCAF1, E6AP, FBXW7a, FBXW7b, beta-TRCP, Keap1, RNF114, RNF125, RNF138, NHLRC1, CBL-b (Y363E), TRIM21, or SPOP, or a truncation or fragment thereof that retains ubiquitin-proteasome recruiting activity. In some embodiments, the URD is the URD of CHIP, DCAF1, E6AP, FBXW7a, Keap1, RNF114, RNF125, RNF138, NHLRC1, CBL-b (Y363E), TRIM21, or SPOP, or a truncation or fragment thereof that retains ubiquitin-proteasome recruiting activity. In some embodiments, the targeting moiety is TCF4. In some embodiments, the bifunctional polypeptide comprises or consists of an amino acid sequence having at least 80%, 85%, 86%, 87%, 88%, 89%, 90%, 91%, 92%, 93%, 94%, 95%, 96%, 97%, 98%, 99%, or 100% sequence identity to any one of SEQ ID NO: 720-1009. In some embodiments where the amino acid sequence differs from a recited reference sequence, the difference is the result of the inclusion of one or more modifications relative to the reference sequence. In some embodiments, the one or more modifications comprise a substitution, insertion and/or deletion. In some embodiments, the substitution is a conservative substitution. In some embodiments, the % sequence identity is calculated over the entirety of the reference sequence.

[0379] In some embodiments, the bifunctional polypeptide targeting CTNNB1 comprises embodiments further sharing one or more elements or features. In some embodiments the shared element or feature is the URD name. In some embodiments the shared element or feature is protein from which the URD is derived. In some embodiments the shared element or feature is one or more of the following: the protein from which the URD is derived; the URD name; the type of targeting moiety; the targeting moiety name; the NLS name; the linker name; the position of the URD relative to the targeting moiety (upstream or downstream); and both the URD name and targeting moiety name. In some embodiments, the HA tag sequence (SEQ ID NO: 50) is excluded

[0380] In some embodiments of the bifunctional polypeptide targeting CTNNB1 the URD is not derived from beta-TRCP. In some embodiments, the URD does not comprise or consist of bTRCP.1. In some embodiments, the URD does not comprise or consist of SEQ ID NOs: 1839.

[0381] In some embodiments, disclosed herein is a polynucleotide encoding any of the bifunctional polypeptides targeting CTNNB1 disclosed above, or elsewhere herein. In some embodiments, the polynucleotide comprises or consists of a nucleic acid sequence having at least 80%, 85%, 86%, 87%, 88%, 89%, 90%, 91%, 92%, 93%, 94%, 95%, 96%, 97%, 98%, 99%, or 100% sequence identity to any one of SEQ ID NOs: 3207-3232. In some embodiments, the % sequence identity is calculated over the entirety of the reference sequence.

TABLE 6
Exemplary CTNNB1 Targeting Moieties

| SEQ ID NO | Category | Name |
|---|---|---|
| 2112 | peptide | TCF4.1 |
| 2113 | peptide | TCF4.10 |
| 2114 | peptide | TCF4.11 |
| 2115 | peptide | TCF4.12 |
| 2116 | peptide | TCF4.14 |
| 2117 | peptide | TCF4.15 |
| 2118 | peptide | TCF4.16 |
| 2119 | peptide | TCF4.2 |
| 2120 | peptide | TCF4.3 |
| 2121 | peptide | TCF4.4 |
| 2122 | peptide | TCF4.5 |
| 2123 | peptide | TCF4.6 |
| 2124 | peptide | TCF4.7 |
| 2125 | peptide | TCF4.8 |
| 2126 | peptide | TCF4.9 |

TABLE 7
Exemplary bifunctional polypeptides targeting CTNNB1 - Grade A

| Description | Grade | SEQ ID NO |
|---|---|---|
| HA-mycNLS-TCF4.1-(GS)₁- NHLRC1.1 | A | 2287 |
| HA-mycNLS-TCF4.1-(GS)₂-NHLRC1.1 | A | 2288 |
| HA-mycNLS-TCF4.1-(GS)₃-NHLRC1.1 | A | 2289 |
| HA-mycNLS-TCF4.1-(GS)₄-NHLRC1.1 | A | 2290 |
| HA-mycNLS-TCF4.1-(GS)₅-NHLRC1.1 | A | 2291 |
| HA-mycNLS-TCF4.1-(GS)₆-NHLRC1.1 | A | 2292 |
| HA-mycNLS-TCF4.1-(GS)₆-NHLRC1.1 | A | 2396 |
| HA-mycNLS-TCF4.9-(GS)₁-NHLRC1.1 | A | 2408 |
| HA-mycNLS-TCF4.2-(GS)₆-NHLRC1.1 | A | 2411 |
| HA-mycNLS-TCF4.6-(GS)₆-NHLRC1.1 | A | 2412 |
| HA-mycNLS-TCF4.2-(GS)₆-NHLRC1.1-hrpNLS | A | 2414 |
| HA-mycNLS-TCF4.12-(GS)₆-NHLRC1.1 | A | 2416 |
| HA-TCF4.2-(GS)6-NHLRC1.1 | A | 2417 |
| HA-mycNLS-TCF4.13-(GS)₆-NHLRC1.1 | A | 2418 |
| HA-mycNLS-TCF4.12-(GS)₁-NHLRC1.1 | A | 2419 |
| HA-mycNLS-TCF4.2-NHLRC1.1 | A | 2420 |
| HA-mycNLS-TCF4.2-NHLRC1.2 | A | 2421 |
| HA-mycNLS-TCF4.12-NHLRC1.1 | A | 2422 |
| HA-mycNLS-TCF4.12-NHLRC1.2 | A | 2423 |
| HA-mycNLS-TCF4.12-(GS)₁- NHLRC1.2 | A | 2424 |
| mycNLS-TCF4.2-(GS)₆-NHLRC1.1 | A | 2425 |
| HA-mycNLS-TCF4.3-(GS)₆-NHLRC1.1 | A | 2449 |
| HA-mycNLS-TCF4.7-(GS)₆-NHLRC1.1 | A | 2451 |
| HA-TCF4.2-(GS)₆-NHLRC1.1-mycNLS | A | 2452 |
| HA-TCF4.2-(GS)₆-NHLRC1.1-nlpNLS | A | 2453 |
| HA-TCF4.2-(GS)₆-NHLRC1.1-hrpNLS | A | 2454 |
| HA-sp.2NLS-TCF4.2-(GS)₆-NHLRC1.1 | A | 2455 |
| HA-nlpNLS-TCF4.2-(GS)₆-NHLRC1.1 | A | 2456 |
| HA-hrpNLS-TCF4.2-(GS)₆-NHLRC1.1 | A | 2457 |

TABLE 8
Exemplary bifunctional polypeptides targeting
CTNNB1 - Grade B

| Description | Grade | SEQ ID NO |
|---|---|---|
| HA-mycNLS-DCAF1.1-(GS)₃-TCF4.1 | B | 2185 |
| HA-mycNLS-DCAF1.1-(GS)₄-TCF4.1 | B | 2186 |
| HA-FBXW7a.1-(GS)₃-TCF4.1 | B | 2197 |
| HA-mycNLS-RNF125.1-(GS)₂-TCF4.1 | B | 2208 |
| HA-mycNLS-RNF125.1-(GS)₃-TCF4.1 | B | 2209 |
| HA-mycNLS-RNF125.1-(GS)₅-TCF4.1 | B | 2211 |
| HA-mycNLS-RNF125.1-(GS)₆-TCF4.1 | B | 2212 |
| HA-Keap1.1-(GS)₃-TCF4.1 | B | 2251 |
| HA-RNF125.1-(GS)₁-TCF4.1 | B | 2255 |
| HA-RNF125.1-(GS)₂-TCF4.1 | B | 2256 |
| HA-RNF125.1-(GS)₃-TCF4.1 | B | 2257 |
| HA-RNF125.1-(GS)₄-TCF4.1 | B | 2258 |
| HA-RNF125.1-(GS)₅-TCF4.1 | B | 2259 |
| RNF138.1-(GS)₃-TCF4.1-mycNLS-HA | B | 2272 |
| RNF166.1-(GS)₃-TCF4.1-mycNLS-HA | B | 2274 |
| CBLb.1-(GS)₁-TCF4.1-mycNLS-HA | B | 2281 |
| CBLb.1-(GS)₂-TCF4.1-mycNLS-HA | B | 2282 |
| CBLb.1-(GS)₄-TCF4.1-mycNLS-HA | B | 2284 |
| CBLb.1-(GS)₆-TCF4.1-mycNLS-HA | B | 2286 |
| NHLRC1.1-(GS)₁-TCF4.1-mycNLS-HA | B | 2293 |
| NHLRC1.1-(GS)₃-TCF4.1-mycNLS-HA | B | 2295 |
| NHLRC1.1-(GS)₄-TCF4.1-mycNLS-HA | B | 2296 |
| NHLRC1.1-(GS)₅-TCF4.1-mycNLS-HA | B | 2297 |
| NHLRC1.1-(GS)₆-TCF4.1-mycNLS-HA | B | 2298 |
| HA-mycNLS-TCF4.14-(GS)₆-NHLRC1.1 | B | 2474 |
| HA-mycNLS-TCF4.2-(GS)₆-NHLRC1.3 | B | 2475 |

TABLE 9
Exemplary bifunctional polypeptides targeting
CTNNB1 - Grade C and D

| Description | Grade | SEQ ID NO |
|---|---|---|
| HA-mycNLS-DCAF1.1-(GS)₁-TCF4.1 | C | 2183 |
| HA-mycNLS-DCAF1.1-(GS)₂-TCF4.1 | C | 2184 |
| HA-mycNLS-DCAF1.1-(GS)₅-TCF4.1 | C | 2187 |
| HA-mycNLS-DCAF1.1-(GS)₆-TCF4.1 | C | 2188 |
| HA-mycNLS-TCF4.1-(GS)₂-E6AP.1 | C | 2190 |
| HA-mycNLS-TCF4(GS)₃-E6AP.1 | C | 2191 |
| HA-mycNLS-TCF4.1-(GS)₅-E6AP.1 | C | 2193 |
| HA-FBXW7a.1-(GS)₁-TCF4.1 | C | 2195 |
| HA-FBXW7a.1-(GS)₂-TCF4.1 | C | 2196 |
| HA-FBXW7a.1-(GS)₄-TCF4.1 | C | 2198 |
| HA-FBXW7a.1-(GS)₆-TCF4.1 | C | 2200 |
| HA-mycNLS-Keap1.1-(GS)₁-TCF4.1 | C | 2201 |
| HA-mycNLS-Keap1.1-(GS)₂-TCF4.1 | C | 2202 |
| HA-mycNLS-Keap1.1-(GS)₃-TCF4.1 | C | 2203 |
| HA-mycNLS-Keap1.1-(GS)₄-TCF4.1 | C | 2204 |
| HA-mycNLS-Keap1.1-(GS)₅-TCF4.1 | C | 2205 |
| HA-mycNLS-RNF125.1-(GS)₁-TCF4.1 | C | 2207 |
| HA-mycNLS-RNF125.1-(GS)₄-TCF4.1 | C | 2210 |
| TCF4.1-(GS)₂-VIF.1-mycNLS-HA | C | 2220 |
| TCF4.1-(GS)₃-VIF.1-mycNLS-HA | C | 2221 |
| TCF4.1-(GS)₄-VIF.1-mycNLS-HA | C | 2222 |
| TCF4.1-(GS)₅-VIF.1-mycNLS-HA | C | 2223 |
| TCF4.1-(GS)₆-VIF.1-mycNLS-HA | C | 2224 |
| HA-DCAF1.1-(GS)₁-TCF4.1 | C | 2231 |
| HA-DCAF1.1-(GS)₂-TCF4.1 | C | 2232 |
| HA-DCAF1.1-(GS)₃-TCF4.1 | C | 2233 |
| HA-DCAF1.1-(GS)₄-TCF4.1 | C | 2234 |
| HA-DCAF1.1-(GS)₅-TCF4.1 | C | 2235 |
| HA-DCAF1.1-(GS)₆-TCF4.1 | C | 2236 |
| HA-TCF4.1-(GS)₁-E6AP.1 | C | 2237 |
| HA-TCF4.1-(GS)₂-E6AP.1 | C | 2238 |
| HA-TCF4.1-(GS)₃-E6AP.1 | C | 2239 |
| HA-TCF4.1-(GS)₅-E6AP.1 | C | 2241 |
| HA-bTRCP.1-(GS)₁-TCF4.1 | C | 2243 |
| HA--bTRCP.1-(GS)₂-TCF4.1 | C | 2244 |
| HA--bTRCP.1-(GS)₃-TCF4.1 | C | 2245 |
| HA--bTRCP.1-(GS)₄-TCF4.1 | C | 2246 |
| HA--bTRCP.1-(GS)₅-TCF4.1 | C | 2247 |
| HA--bTRCP.1-(GS)₆-TCF4.1 | C | 2248 |
| HA-Keap1.1-(GS)₁-TCF4.1 | C | 2249 |
| HA-Keap1.1-(GS)₂-TCF4.1 | C | 2250 |
| HA-Keap1.1-(GS)₄-TCF4.1 | C | 2252 |
| HA-Keap1.1-(GS)₆-TCF4.1 | C | 2254 |
| HA-RNF125.1-(GS)₆-TCF4.1 | C | 2260 |
| TCF4.1-(GS)₅-VIF.1-HA | C | 2265 |
| RNF125.2-(GS)₃-TCF4.1-mycNLS-HA | C | 2268 |
| RNF114.1-(GS)₃-TCF4.1-mycNLS-HA | C | 2270 |
| HA-NLS-TCF4.1-(GS)₃-RNF166.1 | C | 2273 |
| CBLb.1-(GS)₃-TCF4.1-mycNLS-HA | C | 2283 |
| CBLb.1-(GS)₅-TCF4.1-mycNLS-HA | C | 2285 |
| NHLRC1.1-(GS)₂-TCF4.1-mycNLS-HA | C | 2294 |
| RNF125.1-L3H8L3-TCF4.1-mycNLS-HA | C | 2310 |
| RNF125.1-L2H16L3-TCF4.1-mycNLS-HA | C | 2318 |
| TCF4.1-(GS)₁-CHIP.1-mycNLS-HA | D | 2177 |
| TCF4.1-(GS)₂-CHIP.1-mycNLS-HA | D | 2178 |
| TCF4.1-(GS)₃-CHIP.1-mycNLS-HA | D | 2179 |
| TCF4.1-(GS)₄-CHIP.1-mycNLS-HA | D | 2180 |
| TCF4.1-(GS)₅-CHIP.1-mycNLS-HA | D | 2181 |
| TCF4.1-(GS)₆-CHIP.1-mycNLS-HA | D | 2182 |
| HA-mycNLS-TCF4.1-(GS)₁-E6AP.1 | D | 2189 |
| HA-mycNLS-TCF4.1-(GS)₄-E6AP.1 | D | 2192 |
| HA-mycNLS-TCF4.1-(GS)₆-E6AP.1 | D | 2194 |
| HA-FBXW7a.1-(GS)₅-TCF4.1 | D | 2199 |
| HA-mycNLS-Keap1.1-(GS)₆-TCF4.1 | D | 2206 |
| TCF4.1-(GS)₁-SPOP.1-mycNLS-HA | D | 2213 |
| TCF4.1-(GS)₂-SPOP.1-mycNLS-HA | D | 2214 |
| TCF4.1-(GS)₃-SPOP.1-mycNLS-HA | D | 2215 |
| TCF4.1-(GS)₄-SPOP.1-mycNLS-HA | D | 2216 |
| TCF4.1-(GS)₅-SPOP.1-mycNLS-HA | D | 2217 |
| TCF4.1-(GS)₆-SPOP.1-mycNLS-HA | D | 2218 |
| TCF4.1-(GS)₁-VIF.1-mycNLS-HA | D | 2219 |
| TCF4.1-(GS)₁-CHIP.1-HA | D | 2225 |
| TCF4.1-(GS)₂-CHIP.1-HA | D | 2226 |
| TCF4.1-(GS)₃-CHIP.1-HA | D | 2227 |
| TCF4.1-(GS)₄-CHIP.1-HA | D | 2228 |
| TCF4.1-(GS)₅-CHIP.1-HA | D | 2229 |
| TCF4.1-(GS)₆-CHIP.1-HA | D | 2230 |
| HA-TCF4.1-(GS)₄-E6AP.1 | D | 2240 |
| HA-TCF4.1-(GS)₆-E6AP.1 | D | 2242 |
| HA-Keap1.1-(GS)₅-TCF4.1 | D | 2253 |
| TCF4.1-(GS)₁-VIF.1-HA | D | 2261 |
| TCF4.1-(GS)₂-VIF.1-HA | D | 2262 |
| TCF4.1-(GS)₃-VIF.1-HA | D | 2263 |
| TCF4.1-(GS)₄-VIF.1-HA | D | 2264 |
| TCF4.1-(GS)₆-VIF.1-HA | D | 2266 |
| HA-mycNLS-TCF4.1-(GS)₃-RNF125.2 | D | 2267 |
| HA-mycNLS-TCF4.1-(GS)₃-RNF114.1 | D | 2269 |
| HA-mycNLS-TCF4.1-(GS)₃-RNF138.1 | D | 2271 |
| HA-mycNLS-TCF4.1-(GS)₁-CBLb.2 | D | 2275 |
| HA-mycNLS-TCF4.1-(GS)₂-CBLb.1 | D | 2276 |
| HA-mycNLS-TCF4.1-(GS)₃-CBLb.1 | D | 2277 |
| HA-mycNLS-TCF4.1-(GS)₄-CBLb.1 | D | 2278 |
| HA-mycNLS-TCF4.1-(GS)₅-CBLb.1 | D | 2279 |
| HA-mycNLS-TCF4.1-(GS)₆-CBLb.1 | D | 2280 |
| TRIM21.1-TCF4.1-mycNLS-HA | D | 2299 |
| TRIM21.1-(GS)₂-TCF4.1-mycNLS-HA | D | 2300 |
| TRIM21.1-(GS)₄-TCF4.1-mycNLS-HA | D | 2301 |
| RNF125.1-L1H8L1-TCF4.1-mycNLS-HA | D | 2302 |
| RNF125.1-L2H8L1-TCF4.1-mycNLS-HA | D | 2303 |
| RNF125.1-L3H8L1-TCF4.1-mycNLS-HA | D | 2304 |
| RNF125.1-L1H8L2-TCF4.1-mycNLS-HA | D | 2305 |
| RNF125.1-L2H8L2-TCF4.1-mycNLS-HA | D | 2306 |
| RNF125.1-L3H8L2-TCF4.1-mycNLS-HA | D | 2307 |
| RNF125.1-L1H8L3-TCF4.1-mycNLS-HA | D | 2308 |
| RNF125.1-L2H8L3-TCF4.1-mycNLS-HA | D | 2309 |
| RNF125.1-L1H16L1-TCF4.1-mycNLS-HA | D | 2311 |
| RNF125.1-L2H16L1-TCF4.1-mycNLS-HA | D | 2312 |
| RNF125.1-L3H16L1-TCF4.1-mycNLS-HA | D | 2313 |
| RNF125.1-L1H16L2-TCF4.1-mycNLS-HA | D | 2314 |
| RNF125.1-L2H16L2-TCF4.1-mycNLS-HA | D | 2315 |
| RNF125.1-L1H16L3-TCF4.1-mycNLS-HA | D | 2317 |
| RNF125.1-L3H16L3-TCF4.1-mycNLS-HA | D | 2319 |
| RNF125.1-L1H124L1-TCF4.1-mycNLS-HA | D | 2320 |
| RNF125.1-L2H24L1-TCF4.1-mycNLS-HA | D | 2321 |
| RNF125.1-L3H24L1-TCF4.1-mycNLS-HA | D | 2322 |
| RNF125.1-L1H24L2-TCF4.1-mycNLS-HA | D | 2323 |
| RNF125.1-L2H24L2-TCF4.1-mycNLS-HA | D | 2324 |
| RNF125.1-L3H24L2-TCF4.1-mycNLS-HA | D | 2325 |
| RNF125.1-L1H24L3-TCF4.1-mycNLS-HA | D | 2326 |
| RNF125.1-L2H24L3-TCF4.1-mycNLS-HA | D | 2327 |
| RNF125.1-L3H24L3-TCF4.1-mycNLS-HA | D | 2328 |
| RNF125.2-L3H16L2-TCF4.1-mycNLS-HA | D | 2316 |

### Exemplary Bifunctional Degraders Targeting MYC

[0382] One exemplary target protein embodied herein is MYC proto-oncogene, bHLH transcription factor (MYC; c-MYC). In some embodiments, the MYC is a mutant form. An example sequence for MYC is provided as SEQ ID NO: 1 (Uniprot #P01106). MYC is a major oncogene involved in the pathology of many types of cancer, including solid tumors (including but not limited to hepatocellular carcinoma, liver metastases, and colorectal carcinoma) and hematological malignancies. In embodiments disclosed herein, the bifunctional polypeptide comprises a targeting moiety (also referred to as a “binder” or “binding moiety”) that is capable of binding to MYC. Some examples of targeting moieties that target MYC include Omomyc (SEQ ID NO: 6), although other suitable targeting moieties that bind to MYC generally known in the art may also be used. In some embodiments, the targeting moieties that are capable of binding to MYC may be capable of binding, or binding at least in part, to at least a portion of MYC, such as the DNA binding domain of MYC. In some embodiments, the targeting moieties that are capable of binding to MYC are capable of binding, or binding at least in part, to at least a portion of amino acids 54-406, amino acids 354-406 (the DNA binding domain of MYC that binds to Omomye; as seen in PDB: INKP), amino acids 408-437, or amino acids 410-419 (binding epitope of antibody 9E10; as seen in PDB: 2OR9) of MYC (as represented as SEQ ID NO: 1). The bifunctional polypeptides disclosed herein that are specific for MYC may be used for the treatment of a cancer, for example, a cancer exhibiting elevated levels of MYC, for example solid tumors (including but not limited to hepatocellular carcinoma, liver metastases, and colorectal carcinoma) and hematological malignancies.

[0383] In some embodiments, the bifunction polypeptide targeting MYC comprises a localization peptide sequence which directs the bifunctional polypeptide to the nucleus of a cell. In some embodiments, the localization peptide sequence comprises or consists of the NLS sequence selected from the group of the NLS sequences of MYC, SPOP, Hrp1, SV40, and nucleoplasmin. In some, the localization peptide sequence comprises or consists of a NLS sequence selected from the group of the NLS sequence of SPOP, MYC, and Hrp1. In some embodiments, the NLS comprises or consists of a sequence selected from any one of SEQ ID NOs: 1896-1898 and 1900-1904. In some embodiments, the NLS comprises or consists of a sequence selected from any one of SEQ ID NOs: 1896-1898, 1902 and 1904.

[0384] In some embodiments, the bifunctional polypeptide targeting MYC comprises a URD derived from a URD selected from the group consisting of CBL-b (Y363E), CHIP, DCAF1, E6AP, FBXW7-alpha, Keap1, NHLRC1, RNF4, RNF6, RNF11, RNF12, RNF20, RNF25, RNF111, RNF115, RNF125, RNF128, RNF 149, RNF152, RNF165, RNF182, SPOP, TRIM21, TRIM32, VIF, ZNRF1, and ZNRF4. In some embodiments, the URD is a truncation or fragment thereof that retains ubiquitin-proteasome recruiting activity. In some embodiments, the URD is derived from NHLRC1, RNF4, RNF12, RNF182, SPOP or ZNRF1. In some embodiments, the URD is a truncation or fragment thereof that retains ubiquitin-proteasome recruiting activity. In some embodiments, the URD comprises or consists of a sequence selected from any one of SEQ ID NOs: 1836-1838, 1840-1848, 1853-18-64, 1866-1876, 1878-1880, 1882-1895. In some embodiments, the URD comprises or consists of a sequence selected from any one of SEQ ID NOs: 1854-1856, 1858-1862, 1867, 1868, 1882, 1883, 1886, and 1893. In some embodiments, the URD comprises or consists of CBLb.1, CHIP.1, DCAF1.1, E6AP.1, FBXW7a.1, Keap11, NHLRC1.1, NHLRC1.4, NHLRC1.5, RNF4.1, RNF6.1, RNF6.2, RNF11.1, RNF12.1, RNF12.2, RNF20.1, RNF25.1, RNF111.1, RNF115.1, RNF125.1, RNF125.2, RNF125.7, RNF128.1, RNF149. 1, RNF152.1, RNF 165.1, RNF182.1, RNF182.2, SPOP.1, SPOP.2, TRIM21.2, TRIM21.3, TRIM32.1, VIF.1, ZNRF1.1, ZNRF4 1. In some embodiments, the URD comprises or consists of NHLRC1.1, NHLRC1.4, NHLRC1.5, RNF4.1, RNF12.1, RNF12.2, RNF182.1, RNF182.2, SPOP.1, SPOP.2, or ZNRF1.1. In some embodiments, the URD comprises or consists of a sequence selected from any one of SEQ ID NOs: 1836-1838, 1840, 1853-1855, 1857, 1858, 1861-1864, 1866-1870, 1875, 1876, 1878-1880, 1882-1888, and 1890-1895. In some embodiments, the URD comprises or consists of a sequence selected from any one of SEQ ID NOs: 1854, 1855, 1858, 1861, 1862, 1867, 1868, 1882, 1883, 1886, and 1893.

[0385] In some embodiments, the bifunctional polypeptide targeting MYC comprises a targeting moiety that comprises or consists of a targeting moiety disclosed in Table 10. In some embodiments, the targeting moiety comprises or consists of an endogenous protein binding partner of the target protein, a fragment and/or a derivative thereof. In some embodiments, the targeting moiety comprises or consists of Omomyc, or a fragment thereof that is capable of binding to the target protein. In some embodiments, the targeting moiety comprises or consists of an amino acid sequence having at least 80%, 85%, 86%, 87%, 88%, 89%, 90%, 91%, 92%, 93%, 94%, 95%, 96%, 97%, 98%, 99%, or 100% sequence identity to SEQ ID NO: 2086. In some embodiments where the amino acid sequence differs from a recited reference sequence, the difference is the result of the inclusion of one or more modifications relative to the reference sequence. In some embodiments, the one or more modifications comprise a substitution, insertion and/or deletion. In some embodiments, the substitution is a conservative substitution. In some embodiments, the % sequence identity is calculated over the entirety of the reference sequence.

[0386] In some embodiments, the bifunctional polypeptide targeting MYC comprises or consists of an amino acid sequence having at least 80%, 85%, 86%, 87%, 88%, 89%, 90%, 91%, 92%, 93%, 94%, 95%, 96%, 97%, 98%, 99%, or 100% sequence identity to any one of SEQ ID NOs: 2747-2794, optionally wherein the sequence lacks the HA tag sequence (SEQ ID NO: 50). In some embodiments, the bifunctional polypeptide comprises or consists of an amino acid sequence having at least 80%, 85%, 86%, 87%, 88%, 89%, 90%, 91%, 92%, 93%, 94%, 95%, 96%, 97%, 98%, 99%, or 100% sequence identity to any one of the SEQ ID NOS in Table 14 and/or 15, optionally excluding any one of the SEQ ID NOs having a Grade of D, optionally wherein the sequence lacks the HA tag sequence (SEQ ID NO: 50). In some embodiments, the bifunctional polypeptide comprises or consists of an amino acid sequence of any one of the SEQ ID NOs in Table 14, or a range defined by any two of the preceding values, optionally wherein the sequence lacks the HA tag sequence (SEQ ID NO: 50). In some embodiments, the bifunctional polypeptide does not comprise or consist of an amino acid sequence of any one of the SEQ ID NOs in Table 15 having a Grade of C and/or D, optionally wherein the sequence lacks the HA tag sequence (SEQ ID NO: 50). In some embodiments where the amino acid sequence differs from a recited reference sequence, the difference is the result of the inclusion of one or more modifications relative to the reference sequence. In some embodiments, the one or more modifications comprise a substitution, insertion and/or deletion. In some embodiments, the substitution is a conservative substitution. In some embodiments, the % sequence identity is calculated over the entirety of the reference sequence.

[0387] In some embodiments, the bifunctional polypeptide targeting MYC comprises a targeting moiety that comprises or consists of a targeting moiety disclosed in Table 10. In some embodiments, the targeting moiety comprises or consists of a sdAb, optionally comprising or consisting of either a V_{H} domain or a V_{L} domain of an IgG antibody, or a V_{H}H, V_{H}, or V_{NAR} domain of a heavy chain antibody (HcAb). In some embodiments, the sdAb comprises or consists of a V_{H}H domain. In some embodiments, the targeting moiety comprises or consists of a sdAb, optionally a V_{H}H domain, comprising a CDR 1 selected from any one of SEQ ID NOs: 1920, 1928, 1944, and 1952, a CDR2 selected from any one of SEQ ID NOs: 1922, 1930, 1938, and 1946, and a CDR3 selected from any one of SEQ ID NOs: 1924, 1932, 1940, 1948, and 1956. In some embodiments, the combination of CDR1, CDR2, and CDR3 is selected from one of the following combinations:
[0388] a.) SEQ ID NOs: 1920, 1922, and 1924;
[0389] b.) SEQ ID NOs: 1928, 1930, and 1932;
[0390] c.) SEQ ID NOs: 1936, 1938 and 1940;
[0391] d.) SEQ ID NOs: 1944, 1946 and 1948; and
[0392] e) SEQ ID NOs: 1952, 1954 and 1956.

[0393] In some embodiments, each CDR sequence independently comprises 1, 2, 3, 4, 5, 6, 7, or more substitutions (optionally conservative substitutions) and/or 1, 2, 3, 4, 5, 6, 7, or more deletions or additions, and/or has at least 90%, 91%, 92%, 93%, 94%, 95%, 96%, 97%, 98%, 99%, or 100% sequence identity to a sequence selected from any one of SEQ ID NOs: 1920, 1928, 1944, 1952, 1922, 1930, 1938, 1946, 1924, 1932, 1940, 1948, and 1956. In some embodiments, the sdAb, optionally a V_{H}H domain, comprises a VA FR1 selected from any one of SEQ ID NOs: 1919 and 1951, a V_{H} FR2 of SEQ ID NO: 1921, a V_{H} FR3 selected from any one of SEQ ID NOs: 1923, 1939, and 1955, and a V_{H} FR4 selected from any one of SEQ ID NOs: 1925 and 1933. In some embodiments, the combination of FR1, FR2, FR3 and FR4 is selected from one of the following combinations:
[0394] a.) SEQ ID NOs: 1919, 1921, 1923, and 1925;
[0395] b.) SEQ ID NOs: 1927, 1929, 1931, and 1933;
[0396] c.) SEQ ID NOs: 1935, 1937, 1939, and 1941; and
[0397] d.) SEQ ID NOs: 1951, 1953, 1955, and 1957.

[0398] In some embodiments, each VA framework region comprises 1, 2, 3, 4, 5, 6, 7, 8, 9, 10, 11, 12, 13, 14, 15, 16, 17 or more substitutions (optionally conservative substitutions) and/or 1, 2, 3, 4, 5, 6, 7, 8, 9, 10, 11, 12, 13, 14, 15, 16, 17 or more deletions or additions, and/or has at least 90%, 91%, 92%, 93%, 94%, 95%, 96%, 97%, 98%, 99%, or 100% sequence identity to a sequence selected from any one of SEQ ID NOs: 1919, 1951, 1921, 1923, 1939, 1955, 1925, and 1933. In some embodiments, the targeting moiety comprises or consists of a sdAb, optionally a V_{H}H domain, sequence selected from any one of SEQ ID NOs: 1918, 1926, 1934, 1942, 1950, 1958, 1966, 1974, 1982, 1990, 1998, 2006, 2014, 2022, 2030, 2038, 2046, 2054, 2062, 2070, and 2078. In some embodiments, each CDR sequence independently comprises 1, 2, 3, 4, 5, 6, 7, or more substitutions (optionally conservative substitutions) and/or 1, 2, 3, 4, 5, 6, 7, or more deletions or additions, and/or has at least 90%, 91%, 92%, 93%, 94%, 95%, 96%, 97%, 98%, 99%, or 100% sequence identity to a CDR sequence of any one of SEQ ID NOs. 1918, 1926, 1934, 1942, 1950, 1958, 1966, 1974, 1982, 1990, 1998, 2006, 2014, 2022, 2030, 2038, 2046, 2054, 2062, 2070, and 2078, and/or wherein the framework region comprises 1, 2, 3, 4, 5, 6, 7, 8, 9, 10, 11, 12, 13, 14, 15, 16, 17 or more substitutions (optionally conservative substitutions) and/or 1, 2, 3, 4, 5, 6, 7, 8, 9, 10, 11, 12, 13, 14, 15, 16, 17 or more deletions or additions, and/or has at least 90%, 91%, 92%, 93%, 94%, 95%, 96%, 97%, 98%, 99%, or 100% sequence identity to the framework region of any one of SEQ ID NOs: 1918, 1926, 1934, 1942, 1950, 1958, 1966, 1974, 1982, 1990, 1998, 2006, 2014, 2022, 2030, 2038, 2046, 2054, 2062, 2070, and 2078. In some embodiments where the amino acid sequence differs from a recited reference sequence, the difference is the result of the inclusion of one or more modifications relative to the reference sequence. In some embodiments, the one or more modifications comprise a substitution, insertion and/or deletion. In some embodiments, the substitution is a conservative substitution. In some embodiments, the % sequence identity is calculated over the entirety of the reference sequence.

[0399] In some embodiments, the bifunctional polypeptide targeting MYC comprises or consists of an amino acid sequence having at least 80%, 85%, 86%, 87%, 88%, 89%, 90%, 91%, 92%, 93%, 94%, 95%, 96%, 97%, 98%, 99%, or 100% sequence identity to any one of SEQ ID NOs: 2795-3107, and 3238, optionally wherein the sequence lacks the HA tag sequence (SEQ ID NO: 50). In some embodiments, the bifunctional polypeptide comprises or consists of an amino acid sequence having at least 80%, 85%, 86%, 87%, 88%, 89%, 90%, 91%, 92%, 93%, 94%, 95%, 96%, 97%, 98%, 99%, or 100% sequence identity to any one of the SEQ ID NOs in Table 11, 12 and/or 13, optionally excluding any one of the SEQ ID NOs having a Grade of D, optionally wherein the sequence lacks the HA tag sequence (SEQ ID NO: 50). In some embodiments, the bifunctional polypeptide comprises or consists of an amino acid sequence of any one of the SEQ ID NOs in Table 11 and/or 12, optionally wherein the sequence lacks the HA tag sequence (SEQ ID NO: 50). In some embodiments, the bifunctional polypeptide does not comprise or consist of an amino acid sequence of any one of the SEQ ID NOs in Tables 13 having a Grade of C and/or D, optionally wherein the sequence lacks the HA tag sequence (SEQ ID NO: 50). In some embodiments where the amino acid sequence differs from a recited reference sequence, the difference is the result of the inclusion of one or more modifications relative to the reference sequence. In some embodiments, the one or more modifications comprise a substitution, insertion and/or deletion. In some embodiments, the substitution is a conservative substitution. In some embodiments, the % sequence identity is calculated over the entirety of the reference sequence.

[0400] In some embodiments, the target protein is MYC. In some embodiments, the URD is the URD of CHIP, DCAF1, E6AP, FBXW7a, FBXW7b, beta-TRCP, Keap1, RNF114, RNF125, RNF138, NHLRC1, CBL-b (Y363E), TRIM21, or SPOP, or a truncation or fragment thereof that retains ubiquitin-proteasome recruiting activity. In some embodiments, the URD is the URD of CHIP, DCAF1, E6AP, FBXW7a, Keap1, RNF125, or SPOP, or a truncation or fragment thereof that retains ubiquitin-proteasome recruiting activity. In some embodiments, the targeting moiety is Omomyc. In some embodiments, the bifunctional polypeptide comprises or consists of an amino acid sequence having at least 80%, 85%, 86%, 87%, 88%, 89%, 90%, 91%, 92%, 93%, 94%, 95%, 96%, 97%, 98%, 99%, or 100% sequence identity to any one of SEQ ID NO: 240-323. In some embodiments where the amino acid sequence differs from a recited reference sequence, the difference is the result of the inclusion of one or more modifications relative to the reference sequence. In some embodiments, the one or more modifications comprise a substitution, insertion and/or deletion. In some embodiments, the substitution is a conservative substitution. In some embodiments, the % sequence identity is calculated over the entirety of the reference sequence.

[0401] In some embodiments, the bifunctional polypeptide targeting MYC comprises embodiments further sharing one or more elements or features. In some embodiments the shared element or feature is the URD name. In some embodiments the shared element or feature is protein from which the URD is derived. In some embodiments the shared element or feature is one or more of the following: the protein from which the URD is derived; the URD name; the type of targeting moiety; the targeting moiety name; the NLS name; the linker name; the position of the URD relative to the targeting moiety (upstream or downstream); and both the URD name and targeting moiety name. In some embodiments, the HA tag sequence (SEQ ID NO: 50) is excluded.

[0402] In some embodiments of the bifunctional polypeptide targeting MYC the URD is not derived from CHIP. In some embodiments, the URD does not comprise or consist of CHIP.1. In some embodiments, the URD does not comprise or consist of SEQ ID NO: 1836

[0403] In some embodiments, disclosed herein is a polynucleotide encoding any of the bifunctional polypeptides targeting MYC disclosed above, or elsewhere herein. In some embodiments, the polynucleotide comprises or consists of a nucleic acid sequence having at least 80%, 85%, 86%, 87%, 88%, 89%, 90%, 91%, 92%, 93%, 94%, 95%, 96%, 97%, 98%, 99%, or 100% sequence identity to any one of SEQ ID NOs: 3233-3235. In some embodiments, the % sequence identity is calculated over the entirety of the reference sequence.

TABLE 10
Exemplary MYC Targeting Moieties

| SEQ ID NO | Category | Name |
|---|---|---|
| 1918 | sdAb full length | mycV.0300 full |
| 1919 | sdAb FR1 | mycV.0300 VH FR1 |
| 1920 | sdAb CDR1 | mycV.0300 VH CDR1 |
| 1921 | sdAb FR2 | mycV.0300 VH FR2 |
| 1922 | sdAb CDR2 | mycV.0300 VH CDR2 |
| 1923 | sdAb FR3 | mycV.0300 VH FR3 |
| 1924 | sdAb CDR3 | mycV.0300 VH CDR3 |
| 1925 | sdAb FR4 | mycV.0300 VH FR4 |
| 1926 | sdAb full length | mycV.1300 full |
| 1927 | sdAb FR1 | mycV.1300 VH FR1 |
| 1928 | sdAb CDR1 | mycV.1300 VH CDR1 |
| 1929 | sdAb FR2 | mycV.1300 VH FR2 |
| 1930 | sdAb CDR2 | mycV.1300 VH CDR2 |
| 1931 | sdAb FR3 | mycV.1300 VH FR3 |
| 1932 | sdAb CDR3 | mycV.1300 VH CDR3 |
| 1933 | sdAb FR4 | mycV.1300 VH FR4 |
| 1934 | sdAb full length | mycV.1500 full |
| 1935 | sdAb FR1 | mycV.1500 VH FR1 |
| 1936 | sdAb CDR1 | mycV.1500 VH CDR1 |
| 1937 | sdAb FR2 | mycV.1500 VH FR2 |
| 1938 | sdAb CDR2 | mycV.1500 VH CDR2 |
| 1939 | sdAb FR3 | mycV.1500 VH FR3 |
| 1940 | sdAb CDR3 | mycV.1500 VH CDR3 |
| 1941 | sdAb FR4 | mycV.1500 VH FR4 |
| 1942 | sdAb full length | mycV.3700 full |
| 1943 | sdAb FR1 | mycV.3700 VH FR1 |
| 1944 | sdAb CDR1 | mycV.3700 VH CDR1 |
| 1945 | sdAb FR2 | mycV.3700 VH FR2 |
| 1946 | sdAb CDR2 | mycV.3700 VH CDR2 |
| 1947 | sdAb FR3 | mycV.3700 VH FR3 |
| 1948 | sdAb CDR3 | mycV.3700 VH CDR3 |
| 1949 | sdAb FR4 | mycV.3700 VH FR4 |
| 1950 | sdAb full length | mycV.6600 full |
| 1951 | sdAb FR1 | mycV.6600 VH FR1 |
| 1952 | sdAb CDR1 | mycV.6600 VH CDR1 |
| 1953 | sdAb FR2 | mycV.6600 VH FR2 |
| 1954 | sdAb CDR2 | mycV.6600 VH CDR2 |
| 1955 | sdAb FR3 | mycV.6600 VH FR3 |
| 1956 | sdAb CDR3 | mycV.6600 VH CDR3 |
| 1957 | sdAb FR4 | mycV.6600 VH FR4 |
| 1958 | sdAb full length | mycV.1516 full |
| 1959 | sdAb FR1 | mycV.1516 VH FR1 |
| 1960 | sdAb CDR1 | mycV.1516 VH CDR1 |
| 1961 | sdAb FR2 | mycV.1516 VH FR2 |
| 1962 | sdAb CDR2 | mycV.1516 VH CDR2 |
| 1963 | sdAb FR3 | mycV.1516 VH FR3 |
| 1964 | sdAb CDR3 | mycV.1516 VH CDR3 |
| 1965 | sdAb FR4 | mycV.1516 VH FR4 |
| 1966 | sdAb full length | mycV.1515 full |
| 1967 | sdAb FR1 | mycV.1515 VH FR1 |
| 1968 | sdAb CDR1 | mycV.1515 VH CDR1 |
| 1969 | sdAb FR2 | mycV.1515 VH FR2 |
| 1970 | sdAb CDR2 | mycV.1515 VH CDR2 |
| 1971 | sdAb FR3 | mycV.1515 VH FR3 |
| 1972 | sdAb CDR3 | mycV.1515 VH CDR3 |
| 1973 | sdAb FR4 | mycV.1515 VH FR4 |
| 1974 | sdAb full length | mycV.1514 full |
| 1975 | sdAb FR1 | mycV.1514 VH FR1 |
| 1976 | sdAb CDR1 | mycV.1514 VH CDR1 |
| 1977 | sdAb FR2 | mycV.1514 VH FR2 |
| 1978 | sdAb CDR2 | mycV.1514 VH CDR2 |
| 1979 | sdAb FR3 | mycV.1514 VH FR3 |
| 1980 | sdAb CDR3 | mycV.1514 VH CDR3 |
| 1981 | sdAb FR4 | mycV.1514 VH FR4 |
| 1982 | sdAb full length | mycV.1513 full |
| 1983 | sdAb FR1 | mycV.1513 VH FR1 |
| 1984 | sdAb CDR1 | mycV.1513 VH CDR1 |
| 1985 | sdAb FR2 | mycV.1513 VH FR2 |
| 1986 | sdAb CDR2 | mycV.1513 VH CDR2 |
| 1987 | sdAb FR3 | mycV.1513 VH FR3 |
| 1988 | sdAb CDR3 | mycV.1513 VH CDR3 |
| 1989 | sdAb FR4 | mycV.1513 VH FR4 |
| 1990 | sdAb full length | mycV.1512 full |
| 1991 | sdAb FR1 | mycV.1512 VH FR1 |
| 1992 | sdAb CDR1 | mycV.1512 VH CDR1 |
| 1993 | sdAb FR2 | mycV.1512 VH FR2 |
| 1994 | sdAb CDR2 | mycV.1512 VH CDR2 |
| 1995 | sdAb FR3 | mycV.1512 VH FR3 |
| 1996 | sdAb CDR3 | mycV.1512 VH CDR3 |
| 1997 | sdAb FR4 | mycV.1512 VH FR4 |
| 1998 | sdAb full length | mycV.1511 full |
| 1999 | sdAb FR1 | mycV.1511 VH FR1 |
| 2000 | sdAb CDR1 | mycV.1511 VH CDR1 |
| 2001 | sdAb FR2 | mycV.1511 VH FR2 |
| 2002 | sdAb CDR2 | mycV.1511 VH CDR2 |
| 2003 | sdAb FR3 | mycV.1511 VH FR3 |
| 2004 | sdAb CDR3 | mycV.1511 VH CDR3 |
| 2005 | sdAb FR4 | mycV.1511 VH FR4 |
| 2006 | sdAb full length | mycV.1510 full |
| 2007 | sdAb FR1 | mycV.1510 VH FR1 |
| 2008 | sdAb CDR1 | mycV.1510 VH CDR1 |
| 2009 | sdAb FR2 | mycV.1510 VH FR2 |
| 2010 | sdAb CDR2 | mycV.1510 VH CDR2 |
| 2011 | sdAb FR3 | mycV.1510 VH FR3 |
| 2012 | sdAb CDR3 | mycV.1510 VH CDR3 |
| 2013 | sdAb FR4 | mycV.1510 VH FR4 |
| 2014 | sdAb full length | mycV.1509 full |
| 2015 | sdAb FR1 | mycV.1509 VH FR1 |
| 2016 | sdAb CDR1 | mycV.1509 VH CDR1 |
| 2017 | sdAb FR2 | mycV.1509 VH FR2 |
| 2018 | sdAb CDR2 | mycV.1509 VH CDR2 |
| 2019 | sdAb FR3 | mycV.1509 VH FR3 |
| 2020 | sdAb CDR3 | mycV.1509 VH CDR3 |
| 2021 | sdAb FR4 | mycV.1509 VH FR4 |
| 2022 | sdAb full length | mycV.1508 full |
| 2023 | sdAb FR1 | mycV.1508 VH FR1 |
| 2024 | sdAb CDR1 | mycV.1508 VH CDR1 |
| 2025 | sdAb FR2 | mycV.1508 VH FR2 |
| 2026 | sdAb CDR2 | mycV.1508 VH CDR2 |
| 2027 | sdAb FR3 | mycV.1508 VH FR3 |
| 2028 | sdAb CDR3 | mycV.1508 VH CDR3 |
| 2029 | sdAb FR4 | mycV.1508 VH FR4 |
| 2030 | sdAb full length | mycV.1507 full |
| 2031 | sdAb FR1 | mycV.1507 VH FR1 |
| 2032 | sdAb CDR1 | mycV.1507 VH CDR1 |
| 2033 | sdAb FR2 | mycV.1507 VH FR2 |
| 2034 | sdAb CDR2 | mycV.1507 VH CDR2 |
| 2035 | sdAb FR3 | mycV.1507 VH FR3 |
| 2036 | sdAb CDR3 | mycV.1507 VH CDR3 |
| 2037 | sdAb FR4 | mycV.1507 VH FR4 |
| 2038 | sdAb full length | mycV.1506 full |
| 2039 | sdAb FR1 | mycV.1506 VH FR1 |
| 2040 | sdAb CDR1 | mycV.1506 VH CDR1 |
| 2041 | sdAb FR2 | mycV.1506 VH FR2 |
| 2042 | sdAb CDR2 | mycV.1506 VH CDR2 |
| 2043 | sdAb FR3 | mycV.1506 VH FR3 |
| 2044 | sdAb CDR3 | mycV.1506 VH CDR3 |
| 2045 | sdAb FR4 | mycV.1506 VH FR4 |
| 2046 | sdAb full length | mycV.1505 full |
| 2047 | sdAb FR1 | mycV.1505 VH FR1 |
| 2048 | sdAb CDR1 | mycV.1505 VH CDR1 |
| 2049 | sdAb FR2 | mycV.150S VH FR2 |
| 2050 | sdAb CDR2 | mycV.1505 VH CDR2 |
| 2051 | sdAb FR3 | mycV.1505 VH FR3 |
| 2052 | sdAb CDR3 | mycV.1505 VH CDR3 |
| 2053 | sdAb FR4 | mycV.1505 VH FR4 |
| 2054 | sdAb full length | mycV.1504 full |
| 2055 | sdAb FR1 | mycV.1504 VH FR1 |
| 2056 | sdAb CDR1 | mycV.1504 VH CDR1 |
| 2057 | sdAb FR2 | mycV.1504 VH FR2 |
| 2058 | sdAb CDR2 | mycV.1504 VH CDR2 |
| 2059 | sdAb FR3 | mycV.1504 VH FR3 |
| 2060 | sdAb CDR3 | mycV.1504 VH CDR3 |
| 2061 | sdAb FR4 | mycV.1504 VH FR4 |
| 2062 | sdAb full length | mycV.1503 full |
| 2063 | sdAb FR1 | mycV.1503 VH FR1 |
| 2064 | sdAb CDR1 | mycV.1503 VH CDR1 |
| 2065 | sdAb FR2 | mycV.1503 VH FR2 |
| 2066 | sdAb CDR2 | mycV.1503 VH CDR2 |
| 2067 | sdAb FR3 | mycV.1503 VH FR3 |
| 2068 | sdAb CDR3 | mycV.1503 VH CDR3 |
| 2069 | sdAb FR4 | mycV.1503 VH FR4 |
| 2070 | sdAb full length | mycV.1502 full |
| 2071 | sdAb FR1 | mycV.1502 VH FR1 |
| 2072 | sdAb CDR1 | mycV.1502 VH CDR1 |
| 2073 | sdAb FR2 | mycV.1502 VH FR2 |
| 2074 | sdAb CDR2 | mycV.1502 VH CDR2 |
| 2075 | sdAb FR3 | mycV.1502 VH FR3 |
| 2076 | sdAb CDR3 | mycV.1502 VH CDR3 |
| 2077 | sdAb FR4 | mycV.1502 VH FR4 |
| 2078 | sdAb full length | mycV.1501 full |
| 2079 | sdAb FR1 | mycV.1501 VH FR1 |
| 2080 | sdAb CDR1 | mycV.1501 VH CDR1 |
| 2081 | sdAb FR2 | mycV.1501 VH FR2 |
| 2082 | sdAb CDR2 | mycV.1501 VH CDR2 |
| 2083 | sdAb FR3 | mycV.1501 VH FR3 |
| 2084 | sdAb CDR3 | mycV.1501 VH CDR3 |
| 2085 | sdAb FR4 | mycV.1501 VH FR4 |
| 2086 | peptide | OMOMYC |

TABLE 11
Exemplary bifunctional polypeptides with sdAb targeting MYC - Grade A

| Description | Grade | SEQ ID NO |
|---|---|---|
| HA-nlpNLS-RNF125.2-(GGGS)₁-mycV.3700 | A | 2805 |
| HA-nlpNLS-RNF125.2-(GGGS)₂-mycV.3700 | A | 2806 |
| HA-3xsvNLS-mycV.1300-(GGGS)-SPOP.2 | A | 2815 |
| HA-3xsvNLS-mycV.1300-(GGGS)₂-SPOP.2 | A | 2816 |
| HA-nlpNLS-RNF125.2-(GGGS)₁-mycV.1300 | A | 2821 |
| HA-nlpNLS-RNF125.2-(GGGS)₂-mycV.1300 | A | 2822 |
| HA-nlpsvNLS-FBXW7a.1-(GGGS)-mycV.1500 | A | 2829 |
| HA-nlpNLS-mycV.1500-(GGGS)-SPOP.2 | A | 2833 |
| HA-nlpNLS-mycV.1500-(GGGS)₂-SPOP.2 | A | 2834 |
| HA-3xsvNLS-RNF125.2-(GGGS)₁-mycV.1500 | A | 2835 |
| HA-3xsvNLS-RNF125.2-(GGGS)₂-mycV.1500 | A | 2836 |
| HA-nlpNLS-RNF125.2-(GGGS)₁-mycV.1500 | A | 2837 |
| HA-nlpNLS-RNF125.2-(GGGS)₁-mycV.1500 | A | 2837 |
| HA-nlpNLS-RNF125.2-(GGGS)₂-mycV.1500 | A | 2838 |
| HA-nlpNLS-FBXW7a.1-(GGGS)₂-mycV.6600 | A | 2846 |
| HA-nlpNLS-mycV.6600-(GGGS)₁-VIF.1 | A | 2857 |
| HA-nlpNLS-mycV.1500-GGGS-RNF4.1 | A | 2902 |
| HA-nlpNLS-mycV.1500-GGGS-RNF12.2 | A | 2920 |
| HA-nlpNLS-mycV.1510-GGGS-RNF4.1 | A | 2930 |
| HA-nlpNLS-mycV.1511-GGGS-RNF4.1 | A | 2931 |
| HA-nlpNLS-mycV.1512-GGGS-RNF4.1 | A | 2932 |
| HA-nlpNLS-mycV.1513-GGGS-RNF4.1 | A | 2933 |
| HA-nlpNLS-mycV.1514-GGGS-RNF4.1 | A | 2934 |
| HA-nlpNLS-mycV.1515-GGGS-RNF4.1 | A | 2935 |
| HA-nlpNLS-mycV.1516-GGGS-RNF4.1 | A | 2936 |
| HA-spNLS.2-mycV.1500-GGGS-RNF4.1 | A | 2937 |
| HA-mycV.1500-GGGS-RNF4.1-mycNLS | A | 2938 |
| HA-mycV.1500-GGGS-RNF4.1-hrpNLS | A | 2940 |
| HA-mycV.1500-GGGS-RNF4.1-spNLS.2 | A | 2941 |
| HA-spNLS.2-mycV.1500-RNF12.2 | A | 2942 |
| HA-mycV.1500-GGGS-RNF12.2-mycNLS | A | 2943 |
| HA-mycV.1500-GGGS-RNF12.2-nlpNLS | A | 2944 |
| HA-mycV.1500-GGGS-RNF12.2-hrpNLS | A | 2945 |
| HA-RNF125.2-(GGGS)₁-mycV.1500-hrpNLS | A | 2950 |

TABLE 12
Exemplary bifunctional polypeptides with sdAb targeting MYC - Grade B

| Description | Grade | SEQ ID NO |
|---|---|---|
| HA-nlpNLS-mycV.3700-(GGGS)₁-VIF.1 | B | 2809 |
| HA-nlpNLS-mycV.3700-(GGGS)₂-VIF.1 | B | 2810 |
| HA-nlpNLS-FBXW7a.1-(GGGS)₂-mycV.1500 | B | 2830 |
| HA-3xsvNLS-mycV.1500-(GGGS)-SPOP.2 | B | 2831 |
| HA-3xsvNLS-mycV.1500-(GGGS)₂-SPOP.2 | B | 2832 |
| HA-nlpNLS-RNF125.2-(GGGS)₁-mycV.1500 | B | 2837 |
| HA-nlpNLS-mycV.1500-(GGGS)₁-VIF.1 | B | 2841 |
| HA-nlpNLS-mycV.1500-(GGGS)₂-VIF.1 | B | 2842 |
| HA-3xsvNLS-FBXW7a.1-(GGGS)₁-mycV.6600 | B | 2843 |
| HA-3xsvNLS-FBXW7a.1-(GGGS)₂-mycV.6600 | B | 2844 |
| HA-nlpsvNLS-FBXW7a.1-(GGGS)-mycV.6600 | B | 2845 |
| HA-nlpNLS-mycV.6600-(GGGS)-SPOP.2 | B | 2849 |
| HA-nlpNLS-mycV.6600-(GGGS)₂-SPOP.2 | B | 2850 |
| HA-3xsvNLS-RNF125.2-(GGGS)₁-mycV.6600 | B | 2851 |
| HA-3xsvNLS-RNF125.2-(GGGS)₂-mycV.6600 | B | 2852 |
| HA-nlpNLS-RNF125.2-(GGGS)₁-mycV.6600 | B | 2853 |
| HA-nlpNLS-RNF125.2-(GGGS)₂-mycV.6600 | B | 2854 |
| HA-nlpNLS-mycV.6600-(GGGS)₂-VIF.1 | B | 2858 |
| HA-mycNLS-RNF125.2-GGGS-mycV.1500-hrpNLS | B | 2862 |
| HA-mycNLS-mycV.1500-GGGS-NHLRC1.1 | B | 2882 |
| HA-mycNLS-mycV.1500-GGGS-RNF4.1 | B | 2900 |
| HA-nlpNLS-mycV.1500-GGGS-RNF4.1 | B | 2902 |
| HA-hrpNLS-mycV.1500-GGGS-RNF4.1 | B | 2904 |
| HA-nlpNLS-mycV.1500-GGGS-RNF12.2 | B | 2920 |
| HA-nlpNLS-mycV.1509-GGGS-RNF4.1 | B | 2929 |
| HA-mycV.1500-GGGS-RNF4.1-nlpNLS | B | 2939 |
| HA-mycV.1500-GGGS-RNF12.2-spNLS.2 | B | 2946 |
| HA-mycNLS-mycV.1500-GGGS-RNF20.1 | B | 2953 |
| HA-mycNLS-mycV.1500-GGGS-ZNRF1.1 | B | 2957 |
| HA-nlpNLS-mycV.1500-GGGS-ZNRF1.1 | B | 2959 |
| HA-mycNLS-mycV.1500-GGGS-ZNRF4.1 | B | 2961 |
| HA-nlpNLS-mycV.1500-GGGS-ZNRF4.1 | B | 2963 |
| HA-mycNLS-mycV.1500-GGGS-RNF11.1 | B | 2965 |
| HA-mycNLS-mycV.1500-GGGS-RNF182.1 | B | 2973 |

TABLE 13
Exemplary bifunctional polypeptides with sdAb targeting MYC - Grade C and D

| Description | Grade | SEQ ID NO |
|---|---|---|
| HA-nlpNLS-mycV.3700-(GGGS)₂-SPOP.2 | C | 2802 |
| HA-3xsvNLS-RNF125.2-(GGGS)₁-mycV.3700 | C | 2803 |
| HA-3xsvNLS-RNF125.2-(GGGS)₂-mycV.3700 | C | 2804 |
| HA-nlpNLS-RNF125.2-(GGGS)1-mycV.3700 | C | 2805 |
| HA-3xsvNLS-RNF125.2-(GGGS)₁-mycV.1300 | C | 2819 |
| HA-3xsvNLS-RNF125.2-(GGGS)₂-mycV.1300 | C | 2820 |
| HA-nlpNLS-mycV.1300-(GGGS)₁-VIF.1 | C | 2825 |
| HA-nlpNLS-mycV.1300-(GGGS)₂-VIF.1 | C | 2826 |
| HA-3xsvNLS-FBXW7a.1-(GGGS)₂-mycV.1500 | C | 2828 |
| HA-nlpNLS-mycV.1500-(GGGS)1-SPOP.2 | C | 2833 |
| HA-nlpNLS-FBXW7a.1-(GGGS)2-mycV.6600 | C | 2846 |
| HA-mycNLS-mycV.1500-GGGS-RNF125.2-hrpNLS | C | 2863 |
| HA-mycNLS-NHLRC1.1-GGGS-mycV.1500-hrpNLS | C | 2864 |
| HA-mycNLS-RNF125.7-GGGS-mycV.1500-hrpNLS | C | 2866 |
| HA-hrpNLS-mycV.1500-GGGS-RNF125.2 | C | 2880 |
| HA-nlpNLS-CBLb.1-GGGS-mycV.1500 | C | 2889 |
| HA-hrpNLS-TRIM21.2-GGGS-mycV.1500 | C | 2897 |
| HA-hrpNLS-mycV.1500-GGGS-TRIM21.2 | C | 2898 |
| HA-nlpNLS-RNF4.1-GGGS-mycV.1500 | C | 2901 |
| HA-mycNLS-RNF20.1-GGGS-mycV.1500 | C | 2952 |
| HA-nlpNLS-RNF20.1-GGGS-mycV.1500 | C | 2954 |
| HA-nlpNLS-mycV.1500-GGGS-RNF20.1 | C | 2955 |
| HA-mycNLS-ZNRF1.1-GGGS-mycV.1500 | C | 2956 |
| HA-mycNLS-ZNRF4.1-GGGS-mycV.1500 | C | 2960 |
| HA-mycNLS-RNF11.1-GGGS-mycV.1500 | C | 2964 |
| HA-nlpNLS-mycV.1500-GGGS-RNF152.1 | C | 2971 |
| HA-3xsvNLS-FBXW7a.1-(GGGS)₁-mycV.3700 | D | 2795 |
| HA-3xsvNLS-FBXW7a.1-(GGGS)₂-mycV.3700 | D | 2796 |
| HA-nlpsvNLS-FBXW7a.1-(GGGS)-mycV.3700 | D | 2797 |
| HA-nlpNLS-FBXW7a.1-(GGGS)₂-mycV.3700 | D | 2798 |
| HA-3xsvNLS-mycV.3700-(GGGS)-SPOP.2 | D | 2799 |
| HA-nlpNLS-mycV.3700-(GGGS)-SPOP.2 | D | 2801 |
| HA-3xsvNLS-mycV.3700-(GGGS)₁-VIF.1 | D | 2807 |
| HA-3xsvNLS-mycV.3700-(GGGS)₂-VIF.1 | D | 2808 |
| HA-3xsvNLS-FBXW7a.1-(GGGS)₁-mycV.1300 | D | 2811 |
| HA-3xsvNLS-FBXW7a.1-(GGGS)₂-mycV.1300 | D | 2812 |
| HA-nlpsvNLS-FBXW7a.1-(GGGS)-mycV.1300 | D | 2813 |
| HA-nlpNLS-FBXW7a.1-(GGGS)₂-mycV.1300 | D | 2814 |
| HA-nlpNLS-mycV.1300-(GGGS)-SPOP.2 | D | 2817 |
| HA-nlpNLS-mycV.1300-(GGGS)₂-SPOP.2 | D | 2818 |
| HA-3xsvNLS-mycV.1300-(GGGS)₁-VIF.1 | D | 2823 |
| HA-3xsvNLS-mycV.1300-(GGGS)₂-VIF.1 | D | 2824 |
| HA-3xsvNLS-FBXW7a.1-(GGGS)₁-mycV.1500 | D | 2827 |
| HA-nlpNLS-RNF125.2-(GGGS)₁-mycV.1500 | D | 2837 |
| HA-3xsvNLS-mycV.1500-(GGGS)₁-VIF.1 | D | 2839 |
| HA-3xsvNLS-mycV.1500-(GGGS)₂-VIF.1 | D | 2840 |
| HA-3xsvNLS-mycV.6600-(GGGS)₁-VIF.1 | D | 2855 |
| HA-3xsvNLS-mycV.6600-(GGGS)₂-VIF.1 | D | 2856 |
| HA-3xsvNLS-mycV.0300-(GGGS)1-SPOP.2 | D | 2860 |
| HA-mycNLS-mycV.1500-GGGS-NHLRC1.1-hrpNLS | D | 2865 |
| HA-mycNLS-RNF125.7-GGGS-mycV.1500-hrpNLS | D | 2866 |
| HA-mycNLS-RNF125.2-GGGS-mycV.1500 | D | 2875 |
| HA-mycNLS-mycV.1500-GGGS-RNF125.2 | D | 2876 |
| HA-nlpNLS-RNF125.2-GGGS-mycV.1500 | D | 2877 |
| HA-nlpNLS-mycV.1500-GGGS-RNF125.2 | D | 2878 |
| HA-hrpNLS-RNF125.2-GGGS-mycV.1500 | D | 2879 |
| HA-mycNLS-NHLRC1.1-GGGS-mycV.1500 | D | 2881 |
| HA-nlpNLS-NHLRC1.1-GGGS-mycV.1500 | D | 2883 |
| HA-nlpNLS-mycV.1500-GGGS-NHLRC1.1 | D | 2884 |
| HA-hrpNLS-NHLRC1.1-GGGS-mycV.1500 | D | 2885 |
| HA-hrpNLS-mycV.1500-GGGS-NHLRC1.1 | D | 2886 |
| HA-mycNLS-CBLb.1-GGGS-mycV.1500 | D | 2887 |
| HA-mycNLS-mycV.1500-GGGS-CBLb.1 | D | 2888 |
| HA-nlpNLS-mycV.1500-GGGS-CBLb.1 | D | 2890 |
| HA-hrpNLS-CBLb.1-GGGS-mycV.1500 | D | 2891 |
| HA-hrpNLS-mycV.1500-GGGS-CBLb.1 | D | 2892 |
| HA-mycNLS-TRIM21.2-GGGS-mycV.1500 | D | 2893 |
| HA-mycNLS-mycV.1500-GGGS-TRIM21.2 | D | 2894 |
| HA-nlpNLS-TRIM21.2-GGGS-mycV.1500 | D | 2895 |
| HA-nlpNLS-mycV.1500-GGGS-TRIM21.2 | D | 2896 |
| HA-mycNLS-RNF4-GGGS-mycV.1500 | D | 2899 |
| HA-hrpNLS-RNF4.1-GGGS-mycV.1500 | D | 2903 |
| HA-mycNLS-RNF25.1-GGGS-mycV.1500 | D | 2905 |
| HA-mycNLS-mycV.1500-GGGS-RNF25.1 | D | 2906 |
| HA-nlpNLS-RNF25.1-GGGS-mycV.1500 | D | 2907 |
| HA-nlpNLS-mycV.1500-GGGS-RNF25.1 | D | 2908 |
| HA-hrpNLS-RNF25.1-GGGS-mycV.1500 | D | 2909 |
| HA-hrpNLS-mycV.1500-GGGS-RNF25.1 | D | 2910 |
| HA-mycNLS-RNF6.1-GGGS-mycV.1500 | D | 2911 |
| HA-mycNLS-mycV.1500-GGGS-RNF6.2 | D | 2912 |
| HA-nlpNLS-RNF6.1-GGGS-mycV.1500 | D | 2913 |
| HA-nlpNLS-mycV.1500-GGGS-RNF6.2 | D | 2914 |
| HA-hrpNLS-RNF6.1-GGGS-mycV.1500 | D | 2915 |
| HA-hrpNLS-mycV.1500-GGGS-RNF6.2 | D | 2916 |
| HA-mycNLS-RNF12.1-GGGS-mycV.1500 | D | 2917 |
| HA-nlpNLS-RNF12.1-GGGS-mycV.1500 | D | 2919 |
| HA-hrpNLS-RNF12.1-GGGS-mycV.1500 | D | 2921 |
| HA-hrpNLS-mycV.1500-GGGS-RNF12.2 | D | 2922 |
| HA-spNLS.2-RNF125.2-(GGGS)₁-mycV.1500 | D | 2947 |
| HA-RNF125.2-(GGGS)₁-mycV.1500-mycNLS | D | 2948 |
| HA-RNF125.2-(GGGS)₁-mycV.1500-nlpNLS | D | 2949 |
| HA-RNF125.2-(GGGS)₁-mycV.1500-spNLS.2 | D | 2951 |
| HA-nlpNLS-ZNRF1.1-GGGS-mycV.1500 | D | 2958 |
| HA-nlpNLS-ZNRF4.1-GGGS-mycV.1500 | D | 2962 |
| HA-mycNLS-RNF152.1-GGGS-mycV.1500 | D | 2968 |
| HA-mycNLS-mycV.1500-GGGS-RNF152.1 | D | 2969 |
| HA-nlpNLS-RNF152.1-GGGS-mycV.1500 | D | 2970 |
| HA-mycNLS-RNF182.1-GGGS-mycV.1500 | D | 2972 |
| HA-nlpNLS-RNF182.1-GGGS-mycV.1500 | D | 2974 |

TABLE 14
Exemplary bifunctional polypeptides with omomyc
targeting MYC - Grade B

| Description | Grade | SEQ ID NO |
|---|---|---|
| HA-mycNLS-RNF125.1-(GS)₂-OMOMYC | B | 2778 |
| HA-mycNLS-RNF125.1-(GS)₅-OMOMYC | B | 2781 |
| OMOMYC-(GS)₁-VIF.1-mycNLS-HA | B | 2789 |

TABLE 15
Exemplary bifunctional polypeptides with omomyc
targeting MYC - Grade C and D

| Description | Grade | SEQ ID NO |
|---|---|---|
| HA-mycNLS-DCAF1.1-(GS)₁-OMOMYC | C | 2753 |
| HA-mycNLS-DCAF1.1-(GS)₄-OMOMYC | C | 2756 |
| HA-mycNLS-OMOMYC.1-(GS)₆-E6AP | C | 2764 |
| HA-FBXW7a.1-(GS)₄-OMOMYC | C | 2768 |
| HA-mycNLS-Keap1.1-(GS)₁-OMOMYC | C | 2771 |
| HA-mycNLS-Keap1.1-(GS)₃-OMOMYC | C | 2773 |
| HA-mycNLS-RNF125.1-(GS)₁-OMOMYC | C | 2777 |
| HA-mycNLS-RNF125.1-(GS)₄-OMOMYC | C | 2780 |
| HA-mycNLS-RNF125.1-(GS)₆-OMOMYC | C | 2782 |
| OMOMYC-(GS)₂-SPOP.1-mycNLS-HA | C | 2784 |
| OMOMYC-(GS)₂-VIF.1-mycNLS-HA | C | 2790 |
| OMOMYC-(GS)₄-VIF.1-mycNLS-HA | C | 2792 |
| OMOMYC-(GS)₅-VIF.1-mycNLS-HA | C | 2793 |
| OMOMYC-(GS)₆-VIF.1-mycNLS-HA | C | 2794 |
| OMOMYC-(GS)₁-CHIP.1-mycNLS-HA | D | 2747 |
| OMOMYC-(GS)₂-CHIP.1-mycNLS-HA | D | 2748 |
| OMOMYC-(GS)₃-CHIP.1-mycNLS-HA | D | 2749 |
| OMOMYC-(GS)₄-CHIP.1-mycNLS-HA | D | 2750 |
| OMOMYC-(GS)₅-CHIP.1-mycNLS-HA | D | 2751 |
| OMOMYC-(GS)₆-CHIP.1-mycNLS-HA | D | 2752 |
| HA-mycNLS-DCAF1.1-(GS)₂-OMOMYC | D | 2754 |
| HA-mycNLS-DCAF1.1-(GS)₃-OMOMYC | D | 2755 |
| HA-mycNLS-DCAF1.1-(GS)₅-OMOMYC | D | 2757 |
| HA-mycNLS-DCAF1.1-(GS)₆-OMOMYC | D | 2758 |
| HA-mycNLS-OMOMYC-(GS)₁-E6AP.1 | D | 2759 |
| HA-mycNLS-OMOMYC-(GS)₂-E6AP.1 | D | 2760 |
| HA-mycNLS-OMOMYC-(GS)₃-E6AP.1 | D | 2761 |
| HA-mycNLS-OMOMYC-(GS)₄-E6AP.1 | D | 2762 |
| HA-mycNLS-OMOMYC-(GS)₅-E6AP.1 | D | 2763 |
| HA-FBXW7a.1-(GS)₁-OMOMYC | D | 2765 |
| HA-FBXW7a.1-(GS)₂-OMOMYC | D | 2766 |
| HA-FBXW7a.1-(GS)₃-OMOMYC | D | 2767 |
| HA-FBXW7a.1-(GS)₅-OMOMYC | D | 2769 |
| HA-FBXW7a.1-(GS)₆-OMOMYC | D | 2770 |
| HA-mycNLS-Keap1.1-(GS)₂-OMOMYC | D | 2772 |
| HA-mycNLS-Keap1.1-(GS)₄-OMOMYC | D | 2774 |
| HA-mycNLS-Keap1.1-(GS)₅-OMOMYC | D | 2775 |
| HA-mycNLS-Keap1.1-(GS)₆-OMOMYC | D | 2776 |
| HA-mycNLS-RNF125.1-(GS)₃-OMOMYC | D | 2779 |
| OMOMYC-(GS)₁-SPOP.1-mycNLS-HA | D | 2783 |
| OMOMYC-(GS)₃-SPOP.1-mycNLS-HA | D | 2785 |
| OMOMYC-(GS)₄-SPOP.1-mycNLS-HA | D | 2786 |
| OMOMYC-(GS)₃-VIF.1-mycNLS-HA | D | 2791 |
| OMOMYC-(GS)₅-SPOP.1-mycNLS-HA | D | 2787 |
| OMOMYC-(GS)₆-SPOP.1-mycNLS-HA | D | 2788 |

### Exemplary Bifunctional Degraders Targeting PCNA

[0404] In some embodiments, the target protein is proliferating cell nuclear antigen (PCNA). In some embodiments, the PCNA is a mutant form. An example sequence for PCNA is provided as SEQ ID NO: 3239 (Uniprot #P12004). PCNA is a co-factor for DNA polymerase delta and is involved in DNA synthesis and DNA repair. PCNA is implicated in the pathology of various solid tumor cancers (including but not limited to colorectal cancer, breast cancer, lung cancer, and liver cancer) and hematological malignancies. In some embodiments disclosed herein, the dual-specific bifunctional polypeptide comprises a targeting moiety that is capable of binding to PCNA. Some examples of targeting moieties that target PCNA include those listed in Table 16. In some embodiments, other suitable PCNA targeting moieties generally known in the art are used. The bifunctional polypeptides disclosed herein that are specific for PCNA may be used for the treatment of a cancer, for example, solid tumor cancers (including but not limited to colorectal cancer, breast cancer, lung cancer, and liver cancer) and hematological malignancies.

[0405] In some embodiments, the bifunctional polypeptide targeting PCNA comprises a localization peptide sequence which directs the bifunctional polypeptide to the nucleus of a cell. In some embodiments, the localization peptide sequence comprises or consists of a NLS sequence selected from the group of the NLS sequences of MYC, Hrp1, SV40, 53BP1, and nucleoplasmin. In some embodiments, the localization peptide sequence comprises or consists of a NLS sequence selected from the group of the NLS sequence of MYC and nucleoplasmin. In some embodiments, the NLS comprises or consists of a sequence selected from any one of SEQ ID NOs: 1898-1904. In some embodiments, the NLS comprises or consists of a sequence selected from any one of SEQ ID NOs: 1900, 1902 and 1904.

[0406] In some embodiments, the bifunctional polypeptide targeting PCNA comprises a URD derived from a URD selected from the group consisting of CBL-b (Y363E), CHIP, DCAF1, E6AP, FBXW7-alpha, KEAP1, NHLRC1, RNF4, RNF6, RNF12, RNF25, RNF114, RNF125, RNF138, RNF166, SPOP, TRIM21, and VIF. In some embodiments, the URD is a truncation or fragment thereof that retains ubiquitin-proteasome recruiting activity. In some embodiments, the URD is derived from SPOP, NHLRC1, RNF4, RNF12, or RNF125. In some embodiments, the URD is truncation or fragment thereof that retains ubiquitin-proteasome recruiting activity. In some embodiments, the URD comprises or consists of a sequence selected from any one of SEQ ID NOs: 1836-1838, 1840-1848, 1853-1862, 1865, 1867-1875, 1877, 1881, 1885-1887, 1889-1891, and 1895. In some embodiments, the URD comprises or consists of a sequence selected from any one of SEQ ID NOs: 1854-1856, 1858-1862, 1867-1875, and 1886. In some embodiments, the URD comprises or consists of CBLb.1, CHIP.1, DCAF1.1, E6AP.1, FBXW7a.1, KEAP1.1, NHLRC1.1, RNF4.1, RNF6.2, RNF12.2, RNF25.1, RNF114.1, RNF125.2, RNF138.1, RNF166.1, SPOP.2, SPOP.3, TRIM21.2, or VIF.1. In some embodiments, the URD comprises or consists of NHLRC1.1, RNF4.1, RNF12.2, RNF25.1, SPOP.2, or SPOP.3. In some embodiments, the URD comprises or consists of a sequence selected from any one of SEQ ID NOs: 1836-1838, 1840, 1853, 1855-1858, 1865, 1868, 1870, 1877, 1881, 1885, 1886, 1888, 1890, and 1895, optionally wherein the URD comprises or consists of a sequence selected from any one of SEQ ID NOs: 1855, 1856, 1858, 1868, 1885, and 1886.

[0407] In some embodiments, the bifunctional polypeptide targeting PCNA comprises a targeting moiety that comprises or consists of a targeting moiety disclosed in Table 16. In some embodiments, the targeting moiety binds, or binds at least in part, to at least a portion of amino acids 38-48, 123-129, or 251-257 or any combination thereof, of PCNA (SEQ ID NO: 3239). In some embodiments, the targeting moiety comprises or consists of an endogenous protein binding partner of the target protein, a fragment and/or a derivative thereof. In some embodiments, the targeting moiety comprises or consists of con1, con1.1, con1.2, p21, p21.1, p21.2, p21.3, p21.4, p21.5, p21.6, p21.7, p21.8, p21.9, or a fragment thereof that is capable of binding to the target protein. In some embodiments, the targeting moiety does not comprise full length or unmodified con1 or p21. In some embodiments, the targeting moiety comprises or consists of an amino acid sequence having at least 80%, 85%, 86%, 87%, 88%, 89%, 90%, 91%, 92%, 93%, 94%, 95%, 96%, 97%, 98%, 99%, or 100% sequence identity to any one of SEQ ID NOs: 2127-2137. In some embodiments where the amino acid sequence differs from a recited reference sequence, the difference is the result of the inclusion of one or more modifications relative to the reference sequence. In some embodiments, the one or more modifications comprise a substitution, insertion and/or deletion. In some embodiments, the substitution is a conservative substitution. In some embodiments, the % sequence identity is calculated over the entirety of the reference sequence.

[0408] In some embodiments, the bifunctional polypeptide targeting PCNA comprises or consists of an amino acid sequence having at least 80%, 85%, 86%, 87%, 88%, 89%, 90%, 91%, 92%, 93%, 94%, 95%, 96%, 97%, 98%, 99%, or 100% sequence identity to any one of SEQ ID NOs: 3108-3206, optionally wherein the sequence lacks the HA tag sequence (SEQ ID NO: 50). In some embodiments, the bifunctional polypeptide comprises or consists of an amino acid sequence having at least 80%, 85%, 86%, 87%, 88%, 89%, 90%, 91%, 92%, 93%, 94%, 95%, 96%, 97%, 98%, 99%, or 100% sequence identity to any one of the SEQ ID NOs in Table 17 and/or 18, optionally wherein the sequence lacks the HA tag sequence (SEQ ID NO: 50). In some embodiments, the bifunctional polypeptide comprises or consists of an amino acid sequence of any one of the SEQ ID NOs in Table 17 and/or 18, optionally wherein the sequence lacks the HA tag sequence (SEQ ID NO: 50). In some embodiments where the amino acid sequence differs from a recited reference sequence, the difference is the result of the inclusion of one or more modifications relative to the reference sequence. In some embodiments, the one or more modifications comprise a substitution, insertion and/or deletion. In some embodiments, the substitution is a conservative substitution. In some embodiments, the % sequence identity is calculated over the entirety of the reference sequence.

[0409] In some embodiments, the bifunctional polypeptide targeting PCNA comprises embodiments further sharing one or more elements or features. In some embodiments the shared element or feature is the URD name. In some embodiments the shared element or feature is protein from which the URD is derived. In some embodiments the shared element or feature is one or more of the following: the protein from which the URD is derived; the URD name; the type of targeting moiety; the targeting moiety name; the NLS name; the linker name; the position of the URD relative to the targeting moiety (upstream or downstream); and both the URD name and targeting moiety name. In some embodiments, the HA tag sequence (SEQ ID NO: 50) is excluded.

[0410] In some embodiments of the bifunctional polypeptide targeting PCNA the URD is not derived from SPOP. In some embodiments, the URD does not comprise or consist of SPOP.1, SPOP.2, or SPOP.3. In some embodiments, the URD does not comprise or consist of a sequence selected from any one of SEQ ID NOs: 1854-1856.

[0411] In some embodiments, disclosed herein is a polynucleotide encoding any of the bifunctional polypeptides targeting PCNA disclosed above, or elsewhere herein.

TABLE 16
Exemplary PCNA Targeting Moieties

| SEQ ID NO | Category | Name |
|---|---|---|
| 2127 | peptide | con1.1 |
| 2128 | peptide | con1.2 |
| 2129 | peptide | p21.1 |
| 2130 | peptide | p21.2 |
| 2131 | peptide | p21.3 |
| 2132 | peptide | p21.4 |
| 2133 | peptide | p21.5 |
| 2134 | peptide | p21.6 |
| 2135 | peptide | p21.7 |
| 2136 | peptide | p21.8 |
| 2137 | peptide | p21.9 |

TABLE 17
Exemplary bifunctional polypeptides targeting
CNA - Grade A

| Description | Grade | SEQ ID NO |
|---|---|---|
| HA-mycNLS-NHLRC1.1-(GS)₁-con1.1 | A | 3167 |
| HA-mycNLS-NHLRC1.1-(GS)₆-con1.1 | A | 3168 |
| HA-mycNLS-con1.1-(GS)₁-NHLRC1.1 | A | 3169 |
| HA-mycNLS-con1.1-(GS)₆-NHLRC1.1 | A | 3170 |
| HA-mycNLS-con1.1-GGGS-CHIP.1 | A | 3171 |
| HA-mycNLS-con1.1-GGGS-E6AP.1 | A | 3173 |
| HA-FBXW7a.1-GGGS-con1.1 | A | 3174 |
| HA-mycNLS-Keap1.1-GGGS-con1.1 | A | 3175 |
| HA-mycNLS-RNF125.2-GGGS-con1.1 | A | 3177 |
| HA-mycNLS-con1.1-GGGS-NHLRC1.1 | A | 3178 |
| HA-mycNLS-con1.1-GGGS-CBLb.1 | A | 3179 |
| HA-mycNLS-TRIM21.2-GGGS-con1.1 | A | 3180 |
| HA-mycNLS-con1.1-GGGS-RNF4.1 | A | 3181 |
| HA-mycNLS-con1.1-GGGS-RNF25.1 | A | 3182 |
| HA-mycNLS-con1.1-GGGS-RNF6.2 | A | 3183 |
| HA-mycNLS-con1.1-GGGS-RNF12.2 | A | 3184 |
| HA-mycNLS-RNF114.1-GGGS₃-con1.1 | A | 3185 |
| HA-mycNLS-RNF138.1-GGGS-con1.1 | A | 3186 |
| HA-mycNLS-RNF125.2-GGGS-p21.1 | A | 3188 |
| HA-mycNLS-RNF125.2-GGGS-p21.2 | A | 3189 |
| HA-mycNLS-RNF125.2-GGGS-p21.3 | A | 3190 |
| HA-mycNLS-RNF125.2-GGGS-p21.4 | A | 3191 |
| HA-mycNLS-RNF125.2-GGGS-p21.7 | A | 3194 |
| HA-mycNLS-RNF125.2-GGGS-p21.8 | A | 3195 |
| HA-mycNLS-p21.2-GGGS-RNF4.1 | A | 3198 |
| HA-mycNLS-p21.7~GGGS-RNF4.1 | A | 3203 |

TABLE 18
Exemplary bifunctional polypeptides targeting
PCNA - Grade B

| Description | Grade | SEQ ID NO |
|---|---|---|
| HA-mycNLS-DCAF1.1-GGGS-con1.1 | B | 3172 |
| HA-mycNLS-con1.1-GGGS-VIF.1 | B | 3176 |
| HA-mycNLS-RNF166.1-GGGS-con1.1 | B | 3187 |
| HA-mycNLS-RNF125.2-GGGS-p21.5 | B | 3192 |
| HA-mycNLS-RNF125.2-GGGS-p21.6 | B | 3193 |
| HA-mycNLS-RNF125.2-GGGS-p21.9 | B | 3196 |
| HA-mycNLS-p21.1-GGGS-RNF4.1 | B | 3197 |
| HA-mycNLS-p21.3-GGGS-RNF4.1 | B | 3199 |
| HA-mycNLS-p21.4-GGGS-RNF4.1 | B | 3200 |
| HA-mycNLS-p21.5-GGGS-RNF4.1 | B | 3201 |
| HA-mycNLS-p21.6-GGGS-RNF4.1 | B | 3202 |
| HA-mycNLS-p21.8-GGGS-RNF4.1 | B | 3204 |
| HA-mycNLS-p21.9-GGGS-RNF4.1 | B | 3205 |

### Exemplary Bifunctional Degraders Targeting FOXP3

[0412] In some embodiments, the target protein is forkhead box P3 (FOXP3). In some embodiments, the FOXP3 is a mutant form. An example sequence for FOXP3 is provided as SEQ ID NO: 8 (Uniprot #Q9BZS1). FOXP3 is the lineage-defining transcription factor for T regulatory cells, which are known to diminish the activity of cytotoxic T cells and are implicated in the pathology of various solid tumors through modulation of the tumor microenvironment and circulating immune cells. In some embodiments disclosed herein, the bifunctional polypeptide comprises a targeting moiety that is capable of binding to FOXP3. An example of a targeting moiety that targets FOXP3 is the FOXP3 DNA binding domain (FOXP3DBD; SEQ ID NO: 7), which spans amino acids 337-423 of the full length FOXP3 protein, as FOXP3 can form a homodimer. However, other suitable FOXP3 targeting moieties generally known in the art may also be used. In some embodiments, the targeting moieties that are capable of binding to FOXP3 may be capable of binding to at least a portion of FOXP3, such as the DNA binding domain of FOXP3. In some embodiments, the targeting moieties that are capable of binding to FOXP3 are capable of binding, or binding at least in part, to at least a portion of amino acids 337-423 (the DNA binding domain of FOXP3 that homodimerizes; as seen in PDB: 3QRF), or amino acids 284-304 (binding epitope of antibody BLR034F) of FOXP3 (as represented as SEQ ID NO: 8). The bifunctional polypeptides disclosed herein that are specific for FOXP3 may be used for the treatment of a cancer, for example, solid tumors. The bifunctional polypeptides targeting FOXP3 may be used in conjunction with checkpoint blockade or other immunomodulatory therapies (e.g., anti-PD-1, anti-PD-L1, anti-CTLA4, and/or anti-LAG3 antibodies; or adoptive T cell therapies). For example, the bifunctional polypeptides may be effective towards tumors harboring elevated levels of T regulatory cells in the tumor microenvironment.

[0413] In some embodiments, the bifunctional polypeptide targeting FOXP3 comprises a localization peptide sequence which directs the bifunctional polypeptide to the nucleus. In some embodiments, the localization peptide sequence comprises or consists of the NLS sequence of MYC. In some embodiments, the NLS comprises or consists of SEQ ID NOs: 1902 or 1904.

[0414] In some embodiments, the bifunctional polypeptide targeting FOXP3 comprises a URD derived from a URD selected from the group consisting of CHIP, DCAF1, E6AP, FBXW7-alpha, Keap1, RNF125, SPOP, and VIF. In some embodiments, the URD is a truncation or fragment thereof that retains ubiquitin-proteasome recruiting activity. In some embodiments, the URD is derived from E6AP, RNF125, SPOP, or VIF. In some embodiments, the URD is truncation or fragment thereof that retains ubiquitin-proteasome recruiting activity. In some embodiments, the URD comprises or consists of a sequence selected from any one of SEQ ID NOs: 1836-1838, 1840-1848, 1853-1857, and 1869-1875. In some embodiments, the URD comprises or consists of a sequence selected from any one of SEQ ID NOs: 1838, 1854, 1855, 1856, 1857, 1869, 1870, 1871, 1872, 1873, 1874, 1875, and 1876. In some embodiments, the URD comprises or consists of CHIP.1, DCAF1.1, E6AP.1, FBXW7a.1, Keap1.1, RNF125.1, SPOP.1, VIF.1. In some embodiments, the URD comprises or consists of E6AP.1, RNF125.1, SPOP.1, or VIF.1. In some embodiments, the URD comprises or consists of a sequence selected from any one of SEQ ID NOs. 1836-1838, 1840, 1853, 1854, 1857, and 1869. In some embodiments, the URD comprises or consists of a sequence selected from any one of SEQ ID NOs: 1838, 1854, 1857, 1869.

[0415] In some embodiments, the bifunctional polypeptide targeting FOXP3 comprises a targeting moiety that comprises or consists of a targeting moiety disclosed in Table 19. In some embodiments, the targeting moiety binds, or binds at least in part, to at least a portion of: the DNA binding domain of FOXP3, or amino acids 337-423 of FOXP3 (SEQ ID NO: 8). In some embodiments, the targeting moiety comprises or consists of an endogenous protein binding partner of the target protein, a fragment and/or a derivative thereof. In some embodiments, the targeting moiety comprises or consists of FOXP3, FOXP3DBD, or a fragment thereof that is capable of binding to the target protein. In some embodiments, the targeting moiety comprises or consists of an amino acid sequence having at least 80%, 85%, 86%, 87%, 88%, 89%, 90%, 91%, 92%, 93%, 94%, 95%, 96%, 97%, 98%, 99%, or 100% sequence identity to SEQ ID NO: 2111. In some embodiments where the amino acid sequence differs from a recited reference sequence, the difference is the result of the inclusion of one or more modifications relative to the reference sequence. In some embodiments, the one or more modifications comprise a substitution, insertion and/or deletion. In some embodiments, the substitution is a conservative substitution. In some embodiments, the % sequence identity is calculated over the entirety of the reference sequence.

[0416] In some embodiments, the bifunctional polypeptide targeting FOXP3 comprises or consists of an amino acid sequence having at least 80%, 85%, 86%, 87%, 88%, 89%, 90%, 91%, 92%, 93%, 94%, 95%, 96%, 97%, 98%, 99%, or 100% sequence identity to any one of SEQ ID NOs: 2476-2523, optionally wherein the sequence lacks the HA tag sequence (SEQ ID NO: 50). In some embodiments, the bifunctional polypeptide comprises or consists of an amino acid sequence having at least 80%, 85%, 86%, 87%, 88%, 89%, 90%, 91%, 92%, 93%, 94%, 95%, 96%, 97%, 98%, 99%, or 100% sequence identity to any one of the SEQ ID NOS in Table 20 and/or 21, optionally excluding any one of the SEQ ID NOs having a Grade of D, optionally wherein the sequence lacks the HA tag sequence (SEQ ID NO. 50) In some embodiments, the bifunctional polypeptide comprises or consists of an amino acid sequence of any one of the SEQ ID NOs in Table 20, optionally wherein the sequence lacks the HA tag sequence (SEQ ID NO: 50). In some embodiments, the bifunctional polypeptide does not comprise or consist of an amino acid sequence of any one of the SEQ ID NOs in Tables 21 having a Grade of C and/or D, optionally wherein the sequence lacks the HA tag sequence (SEQ ID NO: 50). In some embodiments where the amino acid sequence differs from a recited reference sequence, the difference is the result of the inclusion of one or more modifications relative to the reference sequence. In some embodiments, the one or more modifications comprise a substitution, insertion and/or deletion. In some embodiments, the substitution is a conservative substitution. In some embodiments, the % sequence identity is calculated over the entirety of the reference sequence.

[0417] In some embodiments, the target protein is FOXP3. In some embodiments, the URD is the URD of CHIP, DCAF1, E6AP. FBXW7a, FBXW7b, beta-TRCP, Keap1, RNF114, RNF125, RNF138, NHLRC1, CBL-b (Y363E), TRIM21, or SPOP, or a truncation or fragment thereof that retains ubiquitin-proteasome recruiting activity. In some embodiments, the URD is the URD of CHIP, DCAF1, E6AP, FBXW7a, Keap1, RNF125, or SPOP, or a truncation or fragment thereof that retains ubiquitin-proteasome recruiting activity. In some embodiments, the targeting moiety is FOXP3DBD. In some embodiments, the bifunctional polypeptide comprises or consists of an amino acid sequence having at least 80%, 85%, 86%, 87%, 88%, 89%, 90%, 91%, 92%, 93%, 94%, 95%, 96%, 97%, 98%, 99%, or 100% sequence identity to any one of SEQ ID NO: 324-407. In some embodiments where the amino acid sequence differs from a recited reference sequence, the difference is the result of the inclusion of one or more modifications relative to the reference sequence. In some embodiments, the one or more modifications comprise a substitution, insertion and/or deletion. In some embodiments, the substitution is a conservative substitution. In some embodiments, the % sequence identity is calculated over the entirety of the reference sequence.

[0418] In some embodiments, the bifunctional polypeptide targeting FOXP3 comprises embodiments further sharing one or more elements or features. In some embodiments the shared element or feature is the URD name. In some embodiments the shared element or feature is protein from which the URD is derived. In some embodiments the shared element or feature is one or more of the following: the protein from which the URD is derived; the URD name; the type of targeting moiety; the targeting moiety name; the NLS name; the linker name; the position of the URD relative to the targeting moiety (upstream or downstream), and both the URD name and targeting moiety name. In some embodiments, the HA tag sequence (SEQ ID NO: 50) is excluded.

[0419] In some embodiments of the bifunctional polypeptide targeting FOXP3 the URD is not derived from beta-TRCP. In some embodiments, the URD does not comprise or consist of bTRCP.1. In some embodiments, the URD does not comprise or consist of SEQ ID NO: 1839.

[0420] In some embodiments, disclosed herein is a polynucleotide encoding any of the bifunctional polypeptides targeting FOXP3 disclosed above, or elsewhere herein.

TABLE 19
Exemplary FOXP3 Targeting Moieties

| SEQ ID NO | Category | Name |
|---|---|---|
| 2111 | peptide | FOXP3 DBD |

TABLE 20
Exemplary bifunctional polypeptides targeting
FOXP3 - Grade B

| Description | Grade | SEQ ID NO |
|---|---|---|
| HA-mycNLS-DCAF1.1-(GS)₂-FOXP3DBD | B | 2483 |
| HA-mycNLS-DCAF1.1-(GS)₃-FOXP3DBD | B | 2484 |
| HA-mycNLS-DCAF1.1-(GS)₅-FOXP3DBD | B | 2486 |
| HA-mycNLS-DCAF1.1-(GS)₆-FOXP3DBD | B | 2487 |
| HA-mycNLS-FOXP3DBD-(GS)₁-E6AP.1 | B | 2488 |
| HA-mycNLS-FOXP3DBD-(GS)₂-E6AP.1 | B | 2489 |
| HA-mycNLS-FOXP3DBD-(GS)₃-E6AP.1 | B | 2490 |
| HA-mycNLS-FOXP3DBD-(GS)₄-E6AP.1 | B | 2491 |
| HA-mycNLS-FOXP3DBD-(GS)₅-E6AP.1 | B | 2492 |
| HA-mycNLS-FOXP3DBD-(GS)₆-E6AP.1 | B | 2493 |
| HA-FBXW7a.1-(GS)₃-FOXP3DBD | B | 2496 |
| FOXP3DBD-(GS)₁-VIF.1-mycNLS-HA | B | 2518 |
| FOXP3DBD-(GS)₂-VIF.1-mycNLS-HA | B | 2519 |
| FOXP3DBD-(GS)₃-VIF.1-mycNLS-HA | B | 2520 |
| FOXP3DBD-(GS)₄-VIF.1-mycNLS-HA | B | 2521 |
| FOXP3DBD-(GS)₅-VIF.1-mycNLS-HA | B | 2522 |
| FOXP3DBD-(GS)₆-VIF.1-mycNLS-HA | B | 2523 |

TABLE 21
Exemplary bifunctional polypeptides targeting
FOXP3 - Grade C and D

| Description | Grade | SEQ ID NO |
|---|---|---|
| FOXP3DBD-(GS)₁-CHIP.1-mycNLS-HA | C | 2476 |
| FOXP3DBD-(GS)₃-CHIP.1-mycNLS-HA | C | 2478 |
| FOXP3DBD-(GS)₄-CHIP.1-mycNLS-HA | C | 2479 |
| FOXP3DBD-(GS)₅-CHIP.1-mycNLS-HA | C | 2480 |
| FOXP3DBD-(GS)₆-CHIP.1-mycNLS-HA | C | 2481 |
| HA-mycNLS-DCAF1.1-(GS)₁-FOXP3DBD | C | 2482 |
| HA-mycNLS-DCAF1.1-(GS)₄-FOXP3DBD | C | 2485 |
| HA-FBXW7a.1-(GS)₁-FOXP3DBD | C | 2494 |
| HA-FBXW7a.1-(GS)₂-FOXP3DBD | C | 2495 |
| HA-FBXW7a.1-(GS)₄-FOXP3DBD | C | 2497 |
| HA-FBXW7a.1-(GS)₅-FOXP3DBD | C | 2498 |
| HA-FBXW7a.1-(GS)₆-FOXP3DBD | C | 2499 |
| HA-mycNLS-Keap1.1-(GS)₂-FOXP3DBD | C | 2501 |
| HA-mycNLS-Keap1.1-(GS)₃-FOXP3DBD | C | 2502 |
| HA-mycNLS-Keap1.1-(GS)₄-FOXP3DBD | C | 2503 |
| HA-mycNLS-Keap1.1-(GS)₅-FOXP3DBD | C | 2504 |
| HA-mycNLS-RNF125.1-(GS)₁-FOXP3DBD | C | 2506 |
| HA-mycNLS-RNF125.1-(GS)₂-FOXP3DBD | C | 2507 |
| HA-mycNLS-RNF125.1-(GS)₃-FOXP3DBD | C | 2508 |
| HA-mycNLS-RNF125.1-(GS)₅-FOXP3DBD | C | 2510 |
| HA-mycNLS-RNF125.1-(GS)₆-FOXP3DBD | C | 2511 |
| FOXP3DBD-(GS)₁-SPOP.1-mycNLS-HA | C | 2512 |
| FOXP3DBD-(GS)₂-SPOP.1-mycNLS-HA | C | 2513 |
| FOXP3DBD-(GS)₃-SPOP.1-mycNLS-HA | C | 2514 |
| FOXP3DBD-(GS)₄-SPOP.1-mycNLS-HA | C | 2515 |
| FOXP3DBD-(GS)₅-SPOP.1-mycNLS-HA | C | 2516 |
| FOXP3DBD-(GS)₆-SPOP.1-mycNLS-HA | C | 2517 |
| FOXP3DBD-(GS)₂-CHIP.1-mycNLS-HA | D | 2477 |
| HA-mycNLS-Keap1.1-(GS)₁-FOXP3DBD | D | 2500 |
| HA-mycNLS-Keap1.1-(GS)₆-FOXP3DBD | D | 2505 |
| HA-mycNLS-RNF125.1-(GS)₄-FOXP3DBD | D | 2509 |

### Exemplary Bifunctional Degraders Targeting HTT

[0421] In some embodiments the target protein is huntingtin (HTT). An example sequence for HTT is provided as SEQ ID NO: 2 (Uniprot #P42858). In some embodiments, the HTT is a mutant form (mHTT). In some embodiments, the HTT is a mutant form comprising a polyglutamine expansion at least 36 amino acids long. HTT is involved in the pathology of Huntington's disease. In some embodiments disclosed herein, the bifunctional polypeptide comprises a targeting moiety that is capable of binding to HTT. Some examples of targeting moieties that target HTT include VL12.3 (SEQ ID NO: 9) and INT41 (SEQ ID NO: 10), although other suitable HTT targeting moieties generally known in the art may also be used. In some embodiments, the targeting moieties that are capable of binding to HTT may be capable of binding, or binding at least in part, to at least a portion of HTT, such as the portion of HTT that is encoded by exon 1 of the HTT gene (e.g. amino acids 1-88), N-terminal N17 domain of HTT (e.g. amino acids 1-17), poly-glutamine (polyQ) tract of HTT (e.g., amino acids 18-38 of normal HTT, although this region may be different, shifted, and/or extended in pathological forms of HTT), the binding epitope of known HTT-specific intrabody Vx 12.3 (which is known to be generally within amino acids 1-20 of HTT), or the proline rich region (PRR) at the C-terminal end of the polyQ tract of HTT (e.g. amino acids 39-76 of normal HTT, although his region may be different, shifted, and/or extended in pathological forms of HTT). In some embodiments, the targeting moieties that are capable of binding to HTT are capable of binding, or binding at least in part, to at least a portion of amino acids 1-20 of HTT (as represented as SEQ ID NO: 2). In some embodiments, the targeting moieties that are capable of binding to HTT are capable of binding, or binding at least in part, to at least a portion of the C-terminal end of the polyQ tract of HTT, for example, at least a portion of amino acids 39-76 of HTT (as represented as SEQ ID NO: 2, although this region may be different, shifted, and/or extended in a pathological forms of HTT as understood by a skilled person). The bifunctional polypeptides disclosed herein that are specific for HTT may be used for the treatment and/or prevention of Huntington's disease. Treatment and/or prevention using the bifunctional polypeptides may be directed to patients having a number of CAG trinucleotide repeats in the HTT gene associated with the development of Huntington's disease pathology (e.g., patients having more than 35 CAG trinucleotide repeats, or any number of CAG trinucleotide repeats otherwise generally accepted by medical professionals to result in propensity of a patient to develop Huntington's disease).

[0422] In some embodiments, the bifunctional polypeptide targeting HTT comprises a localization peptide sequence which directs the bifunctional polypeptide to the nucleus of a cell, the cytoplasm of a cell, or the nucleus and the cytoplasm of a cell. In some embodiments, the localization peptide sequence comprises or consists of the NLS sequence of MYC, or FBXW7-alpha. In some embodiments, the localization peptide sequence comprises or consists of the NLS sequence of MYC. In some embodiments, the NLS comprises or consists of a sequence selected from any one of SEQ ID NOs: 1902, 1904 and 1908. In some embodiments, the NLS comprises or consists of a sequence selected from any one of SEQ ID NOs: 1902 or 1904.

[0423] In some embodiments, the bifunctional polypeptide targeting HTT comprises a URD derived from a URD selected from the group consisting of CHIP, DCAF1, E6AP, FBXW7-alpha, FBXW7-beta, KEAP1, NHLRC1, RNF4, RNF12, RNF20, RNF125, RNF128, RNF138, RNF182, SPOP, VIF, and ZNRF1. In some embodiments, the URD is a truncation or fragment thereof that retains ubiquitin-proteasome recruiting activity. In some embodiments, the URD is derived from FBXW7-alpha, FBXW7-beta, RNF4, RNF12, or VIF. In some embodiments, the URD is truncation or fragment thereof that retains ubiquitin-proteasome recruiting activity. In some embodiments, the URD comprises or consists of a sequence selected from any one of SEQ ID NOs: 1836-1838, 1840-1862, 1867-1877, 1882-1884, 1886, and 1893. In some embodiments, the URD comprises or consists of a sequence selected from any one of SEQ ID NOs: 1840-1852, 1857, 1867, 1868, and 1886. In some embodiments, the URD comprises or consists of CHIP.1, DCAF1.1, E6AP. 1, FBXW7a.1, FBXW7a.2, FBXW7a.3, FBXW7a.4, FBXW7a.5, FBXW7a.6, FBXW7a.7, FBXW7a.8, FBXW7a.9, FBXW7b.1, FBXW76.2, FBXW7b.3, FBXW7b.4, KEAP1.1, NHLRC1.1, RNF12.1, RNF12.2, RNF125.1, RNF128.1, RNF138.1, RNF182.1, RNF20.1, RNF4.1, SPOP.1, VIF.1, ZNRF1.1. In some embodiments, the URD comprises or consists of FBXW7a.1, FBXW7a.2, FBXW7a.3, FBXW7a.4, FBXW7a.5, FBXW7a.6, FBXW7a.7, FBXW7a.8, FBXW7a.9, FBXW7b.1, FBXW7b.2, FBXW7b.3, FBXW7b.4, RNF4.1, RNF12.1, RNF12.2, or VIF.1. In some embodiments, the URD comprises or consists of a sequence selected from any one of SEQ ID NOs: 1836-1838, 1840-1854, 1857, 1858, 1867-1869, 1876, 1877, 1882, 1884, 1886, and 1893. In some embodiments, the URD comprises or consists of a sequence selected from any one of SEQ ID NOs: 1840-1852, 1857, 1867, 1868, and 1886.

[0424] In some embodiments, the bifunctional polypeptide targeting HTT comprises a targeting moiety wherein the targeting moiety comprises or consists of a targeting moiety disclosed in Table 22. In some embodiments, the targeting moiety binds, or binds at least in part, to at least a portion of: the portion of HTT that is encoded by exon 1 of the HTT; amino acids 1-88 of HTT (SEQ ID NO: 2) or an analogous region in pathological forms of HTT; amino acids 1-20 of HTT (SEQ ID NO: 2); amino acids 1-17 of HTT (SEQ ID NO: 2); the poly-glutamine (polyQ) tract of HTT, optionally amino acids 18-38 of HTT (SEQ ID NO: 2) or an analogous region in pathological forms of HTT; or the proline rich region (PRR) of HTT, optionally amino acids 39-76 of HTT (SEQ ID NO: 2) or an analogous region in pathological forms of HTT. In some embodiments, the targeting moiety comprises or consists of a Fab, F(ab′)₂, Fab′, scFv, or sdAb, optionally comprising or consisting of either a V_{H} domain or a V_{L} domain of an IgG antibody, or a V_{H}H, V_{H}, or V_{NAR} domain of a heavy chain antibody (HcAb). In some embodiments, the targeting moiety comprises or consists of a scFv or V_{L} domain. In some embodiments, the targeting moiety comprises or consists of VL12.3. In some embodiments, the targeting moiety comprises or consists of INT41.

[0425] In some embodiments, the bifunctional polypeptide targeting HTT comprises a targeting moiety that comprises or consists of a targeting moiety disclosed in Table 22. In some embodiments, the targeting moiety comprises or consists of a sdAb, optionally a V_{L} domain, comprising a CDR1 comprising or consisting of SEQ ID NO: 2089, a CDR2 comprising or consisting of SEQ ID NO: 2091, and a CDR3 comprising or consisting of SEQ ID NO: 2093. In some embodiments, each CDR sequence independently comprises 1, 2, 3, 4, 5, 6, 7, or more substitutions (optionally conservative substitutions) and/or 1, 2, 3, 4, 5, 6, 7, or more deletions or additions, and/or has at least 90%, 91%, 92%, 93%, 94%, 95%, 96%, 97%, 98%, 99%, or 100% sequence identity to a sequence selected from any one of SEQ ID NOs: 2089, 2091, and 2093. In some embodiments, the sdAb, optionally a V_{L} domain, comprises or consists of a framework region sequence comprising or consisting of the framework region of SEQ ID NO: 2078. In some embodiments, the framework region comprises 1, 2, 3, 4, 5, 6, 7, 8, 9, 10, 11, 12, 13, 14, 15, 16, 17 or more substitutions (optionally conservative substitutions) and/or 1, 2, 3, 4, 5, 6, 7, 8, 9, 10, 11, 12, 13, 14, 15, 16, 17 or more deletions or additions, and/or have at least 90%, 91%, 92%, 93%, 94%, 95%, 96%, 97%, 98%, 99%, or 100% sequence identity to the framework region of SEQ ID NO: 2078. In some embodiments, the targeting moiety comprises or consists of SEQ ID NO: 2078. In some embodiments, each CDR sequence independently comprises 1, 2, 3, 4, 5, 6, 7, or more substitutions (optionally conservative substitutions) and/or 1, 2, 3, 4, 5, 6, 7, or more deletions or additions, and/or has at least 90%, 91%, 92%, 93%, 94%, 95%, 96%, 97%, 98%, 99%, or 100% sequence identity to a CDR sequence of SEQ ID NO: 2078, and/or wherein the framework region comprises 1, 2, 3, 4, 5, 6, 7, 8, 9, 10, 11, 12, 13, 14, 15, 16, 17 or more substitutions (optionally conservative substitutions) and/or 1, 2, 3, 4, 5, 6, 7, 8, 9, 10, 11, 12, 13, 14, 15, 16, 17 or more deletions or additions, and/or has at least 90%, 91%, 92%, 93%, 94%, 95%, 96%, 97%, 98%, 99%, or 100% sequence identity to the framework region of SEQ ID NO: 2078. In some embodiments, the bifunctional polypeptide comprises or consists of an amino acid sequence having at least 80%, 85%, 86%, 87%, 88%, 89%, 90%, 91%, 92%, 93%, 94%, 95%, 96%, 97%, 98%, 99%, or 100% sequence identity to any one of SEQ ID NO: 2524-2613 and 2704-2730, optionally wherein the sequence lacks the HA tag sequence (SEQ ID NO: 50). In some embodiments where the amino acid sequence differs from a recited reference sequence, the difference is the result of the inclusion of one or more modifications relative to the reference sequence. In some embodiments, the one or more modifications comprise a substitution, insertion and/or deletion. In some embodiments, the substitution is a conservative substitution. In some embodiments, the % sequence identity is calculated over the entirety of the reference sequence.

[0426] In some embodiments, the bifunctional polypeptide targeting HTT comprises a targeting moiety that comprises or consists of a targeting moiety disclosed in Table 22. In some embodiments, the targeting moiety comprises or consists of a scFv comprising a V_{H} CDR1 comprising or consisting of SEQ ID NO: 2097, a V_{H} CDR2 comprising or consisting of SEQ ID NO: 2099, a V_{H} CDR3 comprising or consisting of SEQ ID NO: 2101, a V_{L} CDR1 comprising or consisting of SEQ ID NO: 2105, a V_{L} CDR2 comprising or consisting of SEQ ID NO: 2107, a V_{L} CDR3 comprising or consisting of SEQ ID NO: 2109. In some embodiments, each CDR sequence independently comprises 1, 2, 3, 4, 5, 6, 7, or more substitutions (optionally conservative substitutions) and/or 1, 2, 3, 4, 5, 6, 7, or more deletions or additions, and/or has at least 90%, 91%, 92%, 93%, 94%, 95%, 96%, 97%, 98%, 99%, or 100% sequence identity to a sequence selected from any one of SEQ ID NOs: 2097, 2099, 2101, 2105, 2107, and 2109. In some embodiments, the scFv comprises or consists of a framework region sequence comprising or consisting of the framework region of SEQ ID NO: 2095. In some embodiments, the framework region comprises 1, 2, 3, 4, 5, 6, 7, 8, 9, 10, 11, 12, 13, 14, 15, 16, 17 or more substitutions (optionally conservative substitutions) and/or 1, 2, 3, 4, 5, 6, 7, 8, 9, 10, 11, 12, 13, 14, 15, 16, 17 or more deletions or additions, and/or has at least 90%, 91%, 92%, 93%, 94%, 95%, 96%, 97%, 98%, 99%, or 100% sequence identity to the framework region of SEQ ID NO: 2095. In some embodiments, the targeting moiety comprises or consists of SEQ ID NO: 2095. In some embodiments, each CDR sequence independently comprises 1, 2, 3, 4, 5, 6, 7, or more substitutions (optionally conservative substitutions) and/or 1, 2, 3, 4, 5, 6, 7, or more deletions or additions, and/or has at least 90%, 91%, 92%, 93%, 94%, 95%, 96%, 97%, 98%, 99%, or 100% sequence identity to a CDR sequence of SEQ ID NO: 2095, and/or wherein the framework region comprises 1, 2, 3, 4, 5, 6, 7, 8, 9, 10, 11, 12, 13, 14, 15, 16, 17 or more substitutions (optionally conservative substitutions) and/or 1, 2, 3, 4, 5, 6, 7, 8, 9, 10, 11, 12, 13, 14, 15, 16, 17 or more deletions or additions, and/or has at least 90%, 91%, 92%, 93%, 94%, 95%, 96%, 97%, 98%, 99%, or 100% sequence identity to the framework region of SEQ ID NO: 2095. In some embodiments, the bifunctional polypeptide comprises or consists of an amino acid sequence having at least 80%, 85%, 86%, 87%, 88%, 89%, 90%, 91%, 92%, 93%, 94%, 95%, 96%, 97%, 98%, 99%, or 100% sequence identity to any one of SEQ ID NOs: 2614-2703 and 2731-2746, optionally wherein the sequence lacks the HA tag sequence (SEQ ID NO. 50). In some embodiments where the amino acid sequence differs from a recited reference sequence, the difference is the result of the inclusion of one or more modifications relative to the reference sequence. In some embodiments, the one or more modifications comprise a substitution, insertion and/or deletion. In some embodiments, the substitution is a conservative substitution. In some embodiments, the % sequence identity is calculated over the entirety of the reference sequence.

[0427] In some embodiments, the bifunctional targeting HTT polypeptide comprises or consists of an amino acid sequence having at least 80%, 85%, 86%, 87%, 88%, 89%, 90%, 91%, 92%, 93%, 94%, 95%, 96%, 97%, 98%, 99%, or 100% sequence identity to any one of the SEQ ID NOs in Table 23, 24 and/or 25, optionally excluding any one of the SEQ ID NOs having a Grade of D, optionally wherein the sequence lacks the HA tag sequence (SEQ ID NO: 50). In some embodiments, the bifunctional polypeptide comprises or consists of an amino acid sequence of any one of the SEQ ID NOs in Table 23 and/or 24, optionally wherein the sequence lacks the HA tag sequence (SEQ ID NO: 50). In some embodiments, the bifunctional polypeptide does not comprise or consist of an amino acid sequence of any one of the SEQ ID NOs in Tables 25 having a Grade of C and/or D, optionally wherein the sequence lacks the HA tag sequence (SEQ ID NO: 50). In some embodiments where the amino acid sequence differs from a recited reference sequence, the difference is the result of the inclusion of one or more modifications relative to the reference sequence. In some embodiments, the one or more modifications comprise a substitution, insertion and/or deletion. In some embodiments, the substitution is a conservative substitution. In some embodiments, the % sequence identity is calculated over the entirety of the reference sequence.

[0428] In some embodiments, the target protein is HTT. In some embodiments, the URD is the URD of CHIP, DCAF1, E6AP, FBXW7a, FBXW7b, beta-TRCP, Keap1, RNF114, RNF125, RNF138, NHLRC1, CBL-b (Y363E), TRIM21, or SPOP, or a truncation or fragment thereof that retains ubiquitin-proteasome recruiting activity. In some embodiments, the URD is the URD of CHIP, DCAF1, E6AP, FBXW7a, FBXW7b, Keap1, RNF125, or SPOP, or a truncation or fragment thereof that retains ubiquitin-proteasome recruiting activity. In some embodiments, the targeting moiety is VL12.3. In some embodiments, the bifunctional polypeptide comprises or consists of an amino acid sequence having at least 80%, 85%, 86%, 87%, 88%, 89%, 90%, 91%, 92%, 93%, 94%, 95%, 96%, 97%, 98%, 99%, or 100% sequence identity to any one of SEQ ID NO: 408-563. In some embodiments, the targeting moiety is INT41. In some embodiments, the bifunctional polypeptide comprises or consists of an amino acid sequence having at least 80%, 85%, 86%, 87%, 88%, 89%, 90%, 91%, 92%, 93%, 94%, 95%, 96%, 97%, 98%, 99%, or 100% sequence identity to any one of SEQ ID NO: 564-719. In some embodiments where the amino acid sequence differs from a recited reference sequence, the difference is the result of the inclusion of one or more modifications relative to the reference sequence. In some embodiments, the one or more modifications comprise a substitution, insertion and/or deletion. In some embodiments, the substitution is a conservative substitution. In some embodiments, the % sequence identity is calculated over the entirety of the reference sequence.

[0429] In some embodiments, the bifunctional polypeptide targeting HTT comprises embodiments further sharing one or more elements or features. In some embodiments the shared element or feature is the URD name. In some embodiments the shared element or feature is protein from which the URD is derived. In some embodiments the shared element or feature is one or more of the following: the protein from which the URD is derived; the URD name; the type of targeting moiety; the targeting moiety name; the NLS name; the linker name; the position of the URD relative to the targeting moiety (upstream or downstream); and both the URD name and targeting moiety name. In some embodiments, the HA tag sequence (SEQ ID NO: 50) is excluded. In some embodiments, disclosed herein is a polynucleotide encoding any of the bifunctional polypeptides targeting HTT disclosed above, or elsewhere herein.

TABLE 22
Exemplary HTT Targeting Moieties

| SEQ ID NO | Category | Name |
|---|---|---|
| 2087 | VL full length | VL12.3 full |
| 2088 | VL FR1 | VL12.3 VL FR1 |
| 2089 | VL CDR1 | VL12.3 VL CDR1 |
| 2090 | VL FR2 | VL12.3 VL FR2 |
| 2091 | VL CDR2 | VL12.3 VL CDR2 |
| 2092 | VL FR3 | VL12.3 VL FR3 |
| 2093 | VL CDR3 | VL12.3 VL CDR3 |
| 2094 | VL FR4 | VL12.3 VL FR4 |
| 2095 | scFv full length | INT41 full |
| 2096 | scFv VH FR1 | INT41 VH FR1 |
| 2097 | scFv VH CDR1 | INT41 VH CDR1 |
| 2098 | scFv VH FR2 | INT41 VH FR2 |
| 2099 | scFv VH CDR2 | INT41 VH CDR2 |
| 2100 | ScFv VH FR3 | INT41 VH FR3 |
| 2101 | scFv VH CDR3 | INT41 VH CDR3 |
| 2102 | scFv VH FR4 | INT41 VH FR4 |
| 2103 | scFv linker | INT41 linker |
| 2104 | scFv VH FR2 | INT41 VL FR1 |
| 2105 | scFv VL CDR1 | INT41 VL CDR1 |
| 2106 | scFv VL FR2 | INT41 VL FR2 |
| 2107 | scFv VL CDR2 | INT41 VL CDR2 |
| 2108 | scFv VL FR3 | INT41 VL FR3 |
| 2109 | scFv VL CDR3 | INT41 VL CDR3 |
| 2110 | scFv VL FR4 | INT41 VL FR4 |

TABLE 23
Exemplary bifunctional polypeptides targeting
HTT - Grade A

| Description | Grade | SEQ ID NO |
|---|---|---|
| HA-FBXW7a.1-(GS)₃-VL12.3 | A | 2544 |
| HA-FBXW7a.1-(GS)₃-VL12.3 | A | 2544 |
| INT41-(GS)₃-SPOP.1-mycNLS-HA | A | 2652 |
| INT41-(GS)₃-VIF.1-mycNLS-HA | A | 2658 |
| INT41-(GS)₃-VIF.1-HA | A | 2700 |

TABLE 24
Exemplary bifunctional polypeptides targeting
HTT -Grade B

| Description | Grade | SEQ ID NO |
|---|---|---|
| HA-FBXW7a.1.1-(GS)₁-VL12.3 | B | 2542 |
| HA-FBXW7a.1-(GS)₂-VL12.3 | B | 2543 |
| HA-FBXW7a.1-(GS)₃-VL12.3 | B | 2544 |
| HA-FBXW7a.1-(GS)₃-VL12.3 | B | 2544 |
| HA-FBXW7a.1-(GS)₄-VL12.3 | B | 2545 |
| HA-FBXW7a.1-(GS)₅-VL12.3 | B | 2546 |
| HA-FBXW7a.1-(GS)₆-VL12.3 | B | 2547 |
| VL12.3-(GS)₁-SPOP.1-mycNLS-HA | B | 2560 |
| VL12.3-(GS)₂-SPOP.1-mycNLS-HA | B | 2561 |
| VL12.3-(GS)₄-SPOP.1-mycNLS-HA | B | 2563 |
| VL12.3-(GS)₅-SPOP.1-mycNLS-HA | B | 2564 |
| VL12.3-(GS)₆-SPOP.1-mycNLS-HA | B | 2565 |
| VL12.3-(GS)₂-VIF.1-mycNLS-HA | B | 2567 |
| VL12.3-(GS)₃-VIF.1-mycNLS-HA | B | 2568 |
| HA-FBXW7b.1-(GS)₁-VL12.3 | B | 2590 |
| HA-FBXW7b.1-(GS)₂-VL12.3 | B | 2591 |
| HA-FBXW7b.1-(GS)₃-VL12.3 | B | 2592 |
| HA-FBXW7b.1-(GS)₃-VL12.3 | B | 2592 |
| HA-FBXW7b.1-(GS)₃-VL12.3 | B | 2592 |
| HA-FBXW7b.1-(GS)₄-VL12.3 | B | 2593 |
| HA-FBXW7b.1-(GS)₅-VL12.3 | B | 2594 |
| HA-FBXW7b.1-(GS)₆-VL12.3 | B | 2595 |
| INT41-(GS)₃-CHIP.1-mycNLS-HA | B | 2616 |
| HA-mycNLS-DCAF1.1-(GS)₃-INT41 | B | 2622 |
| HA-mycNLS-INT41-(GS)₃-E6AP.1 | B | 2628 |
| HA-FBXW7a.1-(GS)₃-INT41 | B | 2634 |
| HA-mycNLS-Keap1.1-(GS)₃-INT41 | B | 2640 |
| HA-mycNLS-RNF125.1-(GS)₃-INT41 | B | 2646 |
| INT41-(GS)₃-VIF.1-mycNLS-HA | B | 2658 |
| INT41-(GS)₃-CHIP.1-HA | B | 2664 |
| HA-DCAF1.1-(GS)₃-INT41 | B | 2670 |
| HA-INT41-(GS)₃-E6AP.1 | B | 2676 |
| HA-FBXW7b.1-(GS)₃-INT41 | B | 2682 |
| HA-Keap1.1-(GS)₃-INT41 | B | 2688 |
| HA-RNF125.1-(GS)₃-INT41 | B | 2694 |
| HA-mycNLS-VL12.3-(GS)₃-RNF4.1 | B | 2718 |
| HA-mycNLS-RNF12.1-(GS)₃-VL12.3 | B | 2719 |
| HA-mycNLS-VL12.3-(GS)₃-RNF12.2 | B | 2720 |
| HA-mycNLS-RNF182.1-(GS)₃-VL12.3 | B | 2721 |
| HA-mycNLS-VL12.3-(GS)₃-RNF182.1 | B | 2722 |
| HA-mycNLS-ZNRF1.1-(GS)₃-VL12.3 | B | 2729 |
| HA-mycNLS-VL12.3-(GS)₃-ZNRF1.1 | B | 2730 |
| HA-mycNLS-RNF138.1-(GS)₃-INT41 | B | 2741 |

TABLE 25
Exemplary bifunctional polypeptides targeting
HTT - Grade C and D

| Description | Grade | SEQ ID NO |
|---|---|---|
| HA-mycNLS-VL12.3-(GS)₅-E6AP.1 | C | 2540 |
| HA-mycNLS-VL12.3-(GS)₆-E6AP.1 | C | 2541 |
| VL12.3-(GS)₃-SPOP.1-mycNLS-HA | C | 2562 |
| VL12.3-(GS)₁-VIF.1-mycNLS-HA | C | 2566 |
| VL12.3-(GS)₄-VIF.1-mycNLS-HA | C | 2569 |
| VL12.3-(GS)₅-VIF.1-mycNLS-HA | C | 2570 |
| VL12.3-(GS)₆-VIF.1-mycNLS-HA | C | 2571 |
| VL12.3-(GS)₁-CHIP.1-HA | C | 2572 |
| HA-VL12.3-(GS)₃-E6AP.1 | C | 2586 |
| VL12.3-(GS)₁-VIF.1-HA | C | 2608 |
| VL12.3-(GS)₂-VIF.1-HA | C | 2609 |
| VL12.3-(GS)₃-VIF.1-HA | C | 2610 |
| VL12.3-(GS)₄-VIF.1-HA | C | 2611 |
| VL12.3-(GS)₅-VIF.1-HA | C | 2612 |
| VL12.3-(GS)₆-VIF.1-HA | C | 2613 |
| HA-RNF125.1-(GS)₃-INT41 | C | 2694 |
| HA-mycNLS-NHLRC1.1-(GS)₃-VL12.3 | C | 2715 |
| HA-mycNLS-RNF20.1-(GS)₃-VL12.3 | C | 2723 |
| HA-mycNLS-VL12.3-(GS)₃-RNF20.1 | C | 2724 |
| HA-mycNLS-VL12.3-(GS)₃-RNF138.1 | C | 2726 |
| HA-mycNLS-VL12.3-(GS)₃-RNF128.1 | C | 2728 |
| HA-mycNLS-INT41-(GS)₃-RNF12.2 | C | 2736 |
| HA-mycNLS-INT41-(GS)₃-RNF182.1 | C | 2738 |
| HA-mycNLS-RNF20.1-(GS)₃-INT41 | C | 2739 |
| HA-mycNLS-INT41-(GS)₃-RNF20.1 | C | 2740 |
| HA-mycNLS-INT41-(GS)₃-RNF128.1 | C | 2744 |
| VL12.3-(GS)₃-CHIP.1-HA | D | 2574 |
| VL12.3-(GS)₁-CHIP.1-mycNLS-HA | D | 2524 |
| VL12.3-(GS)₂-CHIP.1-mycNLS-HA | D | 2525 |
| VL12.3-(GS)₃-CHIP.1-mycNLS-HA | D | 2526 |
| VL12.3-(GS)₄-CHIP.1-mycNLS-HA | D | 2527 |
| VL12.3-(GS)₅-CHIP.1-mycNLS-HA | D | 2528 |
| VL12.3-(GS)₆-CHIP.1-mycNLS-HA | D | 2529 |
| HA-mycNLS-DCAF1.1-(GS)₁-VL12.3 | D | 2530 |
| HA-mycNLS-DCAF1.1-(GS)₂-VL12.3 | D | 2531 |
| HA-mycNLS-DCAF1.1-(GS)₃-VL12.3 | D | 2532 |
| HA-mycNLS-DCAF1.1-(GS)₄-VL12.3 | D | 2533 |
| HA-mycNLS-DCAF1.1-(GS)₅-VL12.3 | D | 2534 |
| HA-mycNLS-DCAF1.1-(GS)₆-VL12.3 | D | 2535 |
| HA-mycNLS-VL12.3-(GS)₁-E6AP.1 | D | 2536 |
| HA-mycNLS-VL12.3-(GS)₂-E6AP.1 | D | 2537 |
| HA-mycNLS-VL12.3-(GS)₃-E6AP.1 | D | 2538 |
| HA-mycNLS-VL12.3-(GS)₄-E6AP.1 | D | 2539 |
| HA-mycNLS-Keap1.1-(GS)₁-VL12.3 | D | 2548 |
| HA-mycNLS-Keap1.1-(GS)₂-VL12.3 | D | 2549 |
| HA-mycNLS-Keap1.1-(GS)₃-VL12.3 | D | 2550 |
| HA-mycNLS-Keap1.1-(GS)₄-VL12.3 | D | 2551 |
| HA-mycNLS-Keap1.1-(GS)₅-VL12.3 | D | 2552 |
| HA-mycNLS-Keap1.1-(GS)₆-VL12.3 | D | 2553 |
| HA-mycNLS-RNF125.1-(GS)₁-VL12.3 | D | 2554 |
| HA-mycNLS-RNF125.1-(GS)₂-VL12.3 | D | 2555 |
| HA-mycNLS-RNF125.1-(GS)₃-VL12.3 | D | 2556 |
| HA-mycNLS-RNF125.1-(GS)₃-VL12.3 | D | 2556 |
| HA-mycNLS-RNF125.1-(GS)₄-VL12.3 | D | 2557 |
| HA-mycNLS-RNF125.1-(GS)₅-VL12.3 | D | 2558 |
| HA-mycNLS-RNF125.1-(GS)₆-VL12.3 | D | 2559 |
| VL12.3-(GS)₂-CHIP.1-HA | D | 2573 |
| VL12.3-(GS)₄-CHIP.1-HA | D | 2575 |
| VL12.3-(GS)₅-CHIP.1-HA | D | 2576 |
| VL12.3-(GS)₆-CHIP.1-HA | D | 2577 |
| HA-DCAF1.1-(GS)₁-VL12.3 | D | 2578 |
| HA-DCAF1.1-(GS)₂-VL12.3 | D | 2579 |
| HA-DCAF1.1-(GS)₃-VL12.3 | D | 2580 |
| HA-DCAF1.1-(GS)₄-VL12.3 | D | 2581 |
| HA-DCAF1.1-(GS)₅-VL12.3 | D | 2582 |
| HA-DCAF1.1-(GS)₆-VL12.3 | D | 2583 |
| HA-VL12.3-(GS)₁-E6AP.1 | D | 2584 |
| HA-VL12.3-(GS)₂-E6AP.1 | D | 2585 |
| HA-VL12.3-(GS)₄-E6AP.1 | D | 2587 |
| HA-VL12.3-(GS)₅-E6AP.1 | D | 2588 |
| HA-VL12.3-(GS)₆-E6AP.1 | D | 2589 |
| HA-Keap1.1-(GS)₁-VL12.3 | D | 2596 |
| HA-Keap1.1-(GS)₂-VL12.3 | D | 2597 |
| HA-Keap1.1-(GS)₃-VL12.3 | D | 2598 |
| HA-Keap1.1-(GS)₄-VL12.3 | D | 2599 |
| HA-Keap1.1-(GS)₅-VL12.3 | D | 2600 |
| HA-Keap1.1-(GS)₆-VL12.3 | D | 2601 |
| HA-RNF125.1-(GS)₁-VL12.3 | D | 2602 |
| HA-RNF125.1-(GS)₂-VL12.3 | D | 2603 |
| HA-RNF125.1-(GS)₃-VL12.3 | D | 2604 |
| HA-RNF125.1-(GS)₄-VL12.3 | D | 2605 |
| HA-RNF125.1-(GS)₅-VL12.3 | D | 2606 |
| HA-RNF125.1-(GS)₆-VL12.3 | D | 2607 |
| HA-mycNLS-RNF4.1-(GS)₃-VL12.3 | D | 2717 |
| HA-mycNLS-RNF138.1-(GS)₃-VL12.3 | D | 2725 |
| HA-mycNLS-RNF128.1-(GS)₃-VL12.3 | D | 2727 |
| HA-mycNLS-INT41-(GS)₃-RNF4.1 | D | 2734 |
| HA-mycNLS-RNF12.1-(GS)₃-INT41 | D | 2735 |
| HA-mycNLS-RNF182.1-(GS)₃-INT41 | D | 2737 |
| HA-mycNLS-INT41-(GS)₃-RNF138.1 | D | 2742 |
| HA-mycNLS-RNF128.1-(GS)₃-INT41 | D | 2743 |
| HA-mycNLS-ZNRF1.1-(GS)₃-INT41 | D | 2745 |
| HA-mycNLS-INT41-(GS)₃-ZNRF1.1 | D | 2746 |

### Additional Structural Features of the Polypeptides

[0430] The following features are generally applicable to the disclosed herein embodiments of: polypeptides comprising portions derived from a protein selected from the group consisting of a RING family E3 ubiquitin ligase, a cullin family E3 ubiquitin ligase, a homologous to E6AP carboxyl terminus (HECT) family E3 ubiquitin ligase, and a viral homolog of an E3 ubiquitin ligase; bifunctional polypeptides; and bifunctional polypeptides that promote proteasome-mediated degradation of a target protein.

### Linker Peptides

[0431] In some embodiments, the polypeptide or the bifunctional polypeptide disclosed above and herein further comprise one or more linker peptides. In some embodiments, the linker peptide is a length that allows for ubiquitination of the target protein via the URD when the target protein is bound by the targeting moiety. Any suitable linker peptide generally known in the art may be used in embodiments herein. In some embodiments, the linker peptide is positioned between one or more of: the targeting moiety and the URD; the NLS and the targeting moiety; the NLS and the URD; and/or the NLS and an epitope tag, optionally an HA tag. In some embodiments, the linker peptide is positioned between the targeting moiety and the URD. In some embodiments, the linker peptide is 0 (i.e. there is no linker), 1, 2, 3, 4, 5, 6, 7, 8, 9, 10, 11, 12, 13, 14, 15, 16, 17, 18, 19, 20, 21, 22, 23, 24, 25, 26, 27, 28, 29 or 30 amino acids in length, or a range defined by any two of the preceding values. In some embodiments, the linker peptide is 0-30, 1-30, 2-30, 0-20, 1-20, 2-20, 0-15, 0-12, 0-10, 1-15, 1-12, 1-10, 2-15, 2-12, 2-10, 3-15, 3-12, or 3-10 amino acids in length, optionally 2-30 amino acids in length. In some embodiments, the linker peptide comprises or consists of glycine and serine. In some embodiments, the linker peptide comprises or consists of one or more alpha helixes, optionally flanked by one or more glycine and/or a serine residues. In some embodiments, the linker peptide comprises or consists of the amino acid sequence of any one of SEQ ID NOs: 2138-2176.

[0432] Exemplary linkers are embodied in the amino acid sequences of SEQ ID NOs: 44-49 and nucleic acid sequences of SEQ ID NOs: 1180-1185. An exemplary NLS is embodied in the amino acid sequence of SEQ ID NO: 51 and nucleic acid sequence of SEQ ID NO: 1187.

[0433] In some embodiments, the bifunctional polypeptide further comprises a linker peptide. In some embodiments, the linker peptide is positioned between the targeting moiety and the URD. In some embodiments, the linker peptide is 2, 3, 4, 5, 6, 7, 8, 9, 10, 11, 12, 13, 14, 15, 16, 17, 18, 19, 20, 21, 22, 23, 24, 25, 26, 27, 28, 29, 30, 31, 32, 33, 34, 35, 36, 37, 38, 39, or 40 amino acids in length, or any range defined by any two of the aforementioned lengths, for example, 2-40 amino acids, 2-20 amino acids, 2-10 amino acids, 10-20 amino acids, or 20-40 amino acids. In some embodiments, the linker peptide is 2 to 20 amino acids in length. In some embodiments, the linker peptide comprises or consists of glycine and serine. In some embodiments, the linker peptide comprises or consists of the amino acid sequence of any one of SEQ ID NO: 44-49.

TABLE 26
Exemplary linker sequences

| SEQ ID NO | Linker Name |
|---|---|
| 2138 | 12xGS |
| 2139 | 9xGS |
| 2140 | 6xGS |
| 2141 | 5xGS |
| 2142 | 4xGS |
| 2143 | 3xGS |
| 2144 | 2xGS |
| 2145 | 1xGS |
| 2146 | 3xGGGS + GS |
| 2147 | 3xGGGS |
| 2148 | 2xGGGS |
| 2149 | GGGS |
| 2150 | L3H24L3 |
| 2151 | L2H24L3 |
| 2152 | L1H24L3 |
| 2153 | L3H24L2 |
| 2154 | L2H24L2 |
| 2155 | L1H24L2 |
| 2156 | L3H24L1 |
| 2157 | L2H24L1 |
| 2158 | L1H24L1 |
| 2159 | L3H16L3 |
| 2160 | L2H16L3 |
| 2161 | L1H16L3 |
| 2162 | L3H16L2 |
| 2163 | L2H16L2 |
| 2164 | L1H16L2 |
| 2165 | L3H16L1 |
| 2166 | L2H16L1 |
| 2167 | L1H16L1 |
| 2168 | L3H8L3 |
| 2169 | L2H8L3 |
| 2170 | L1H8L3 |
| 2171 | L3H8L2 |
| 2172 | L2H8L2 |
| 2173 | L1H8L2 |
| 2174 | L3H8L1 |
| 2175 | L2H8L1 |
| 2176 | L1H8L1 |

### Orientation of Elements of Polypeptides

[0434] In some embodiments, the polypeptide or the bifunctional polypeptide disclosed above and herein comprises a targeting moiety and a URD. The orientation of the URD and SRD of exemplary proteins from which URDs can be derived is provided in Table 1, with “URD-SRD” indicating the URD is upstream of the SRD, and “SRD-URD” indicating the SRD is upstream of the URD, when viewed in the standard N- to C-terminal direction. In some embodiments, the orientation of the targeting moiety relative to the URD is the same orientation as compared to the naturally occurring substrate recognition domain (SRD) of the protein from which the URD is derived. In some embodiments, the orientation of the targeting moiety relative to the URD is the opposite orientation as compared to the naturally occurring substrate recognition domain of the protein from which the URD is derived. In some embodiments, the targeting moiety is N-terminal relative to the URD. In some embodiments, the targeting moiety is C-terminal relative to the URD.

### Tag Peptides

[0435] In some embodiments, the polypeptide or the bifunctional polypeptide disclosed above and herein further comprises an epitope tag. In some embodiments, the epitope tag is a hemagglutinin (HA) tag. In some embodiments, the HA tag comprises or consists of the amino acid sequence of SEQ ID NO: 50. In some embodiments, the polypeptide or bifunctional polypeptide does not comprise an epitope tag. In some embodiments, the polypeptide or bifunctional polypeptide does not comprise a hemagglutinin (HA) tag. In some embodiments, the polypeptide or bifunctional polypeptide does not comprise an HA tag comprising or consisting of the amino acid sequence of SEQ ID NO: 50. In some embodiments, the epitope tag can be used to visualize the bifunctional polypeptide. Typically, bifunctional polypeptides comprising an epitope tag will be used for experimentation and visualization purposes. In some embodiments, the bifunctional polypeptides intended for treatment do not have an epitope tag. In some embodiments, the bifunctional polypeptides intended for treatment have an epitope tag.

### Overall Size of the Bifunctional Polypeptides

[0436] In some embodiments, the polypeptide or the bifunctional polypeptide disclosed above and herein is, is about, is at least, is at least about, is not more than, or is not more than about, 50, 60, 70, 80, 90, 100, 110, 120, 130, 140, 150, 160, 170, 180, 190, 200, 250, 300, 350, 400, 450, 500, 550, 600, 650, 700, 750, or 800 amino acids long, or a range defined by any two of the preceding values, for example, 50-800 amino acids, 50-400 amino acids, 400-800 amino acids, or 100-700 amino acids long. In some embodiments, the polypeptide or the bifunctional polypeptide is, or is less than, 50, 60, 70, 80, 90, 100, 110, 120, 130, 140, 150, 160, 170, 180, 190, 200, 250, 300, 350, 400, 450, 500, 550, 600, 650, 700, 750, or 800 amino acids long, or a range defined by any two of the preceding values, optionally 50-800, 50-650, 50-500, 50-400, 70-800, 70-650, 70-500, 70-400, 70-300, 70-200, 80-800, 80-650, 80-500, 80-400, 80-300, or 80-200 amino acids long, optionally 90-550, 150-550, or 80-450 amino acids long.

### Binding Characteristics

[0437] In some embodiments, the targeting moieties and/or bifunctional polypeptide of the present disclosure have an equilibrium dissociation constant of less (that is superior binding) than about 10⁻⁷ or 10⁻⁸ M, for example, less than about 10⁻⁹ M or 10⁻¹⁰ M, in some embodiments, less than about 10⁻¹¹ M, 10⁻¹² M, or 10⁻¹³ M. In some embodiments, the targeting moiety binds selectively to the target protein. In some embodiments, the targeting moiety binds specifically to the target protein.

### Exemplary Polypeptides Defined by Sequence

[0438] Disclosed herein are embodiments of polypeptides or bifunctional polypeptides, wherein the polypeptide or bifunctional polypeptide comprises or consists of an amino acid sequence having at least 80%, 85%, 86%, 87%, 88%, 89%, 90%, 91%, 92%, 93%, 94%, 95%, 96%, 97%, 98%, 99%, or 100% sequence identity to:
[0439] i) any one of SEQ ID NOs: 2177-2328, 2331-3205 and 3238,
[0440] ii) any one of SEQ ID NOs: 2177-2328, 2331-3205 and 3238 wherein the sequence lacks the HA tag sequence (SEQ ID NO: 50), or
[0441] iii) the polypeptide encoded by the polynucleotide of any one of SEQ ID NOS: 3207-3235.

[0442] In some embodiments, the polypeptide or bifunctional polypeptide is a non-natural polypeptide. In some embodiments, the % sequence identity is calculated over the entirety of the reference sequence.

[0443] Disclosed herein are embodiments of polypeptides or bifunctional polypeptides, wherein the polypeptide or bifunctional polypeptide comprises or consists of an amino acid sequence having at least 80%, 85%, 86%, 87%, 88%, 89%, 90%, 91%, 92%, 93%, 94%, 95%, 96%, 97%, 98%, 99%, or 100% sequence identity to:
[0444] i) any one of SEQ ID NOs: 1836-1895;
[0445] ii) any one of SEQ ID NOs: 18965-1909;
[0446] iii) any one of SEQ ID NOs: 1918, 1926, 1934, 1942, 1950, 1958, 1966, 1974, 1982, 1990, 1998, 2006, 2014, 2022, 2030, 2038, 2046, 2054, 2062, 2070, 2078, 2086, 2087, 2095, and 2111-2137;
[0447] iv) any one of SEQ ID NOs: 2177-2328, 2331-3205 and 3238;
[0448] v) any one of SEQ ID NOs: 2177-2328, 2331-3205 and 3238 wherein the sequence lacks the HA tag sequence (SEQ ID NO: 50); or
[0449] vi) the polypeptide encoded by the polynucleotide of any one of SEQ ID NOs: 3207-3235.

[0450] In some embodiments, the polypeptide or bifunctional polypeptide is a non-natural polypeptide. In some embodiments, the % sequence identity is calculated over the entirety of the reference sequence.

### Modifications

[0451] In some embodiments of the polypeptide or bifunctional polypeptide disclosed herein wherein the amino acid sequence differs from the recited reference sequence the difference is the result of the inclusion of one or more modifications relative to the reference sequence. In some embodiments, the one or more modifications comprise a substitution, insertion and/or deletion. In some embodiments, the substitution is a conservative substitution. In some embodiments, the % sequence identity is calculated over the entirety of the reference sequence.

### Exemplary Polynucleotides

[0452] Also disclosed herein in some embodiments, are polynucleotides encoding for a polypeptide having at least 80%, 85%, 86%, 87%, 88%, 89%, 90%, 91%, 92%, 93%, 94%, 95%, 96%, 97%, 98%, 99%, or 100% sequence identity to any of polypeptides or the bifunctional polypeptides disclosed herein. In some embodiments, the polynucleotide is a DNA or an RNA. In some embodiments, the RNA is an mRNA or a circular RNA. In some embodiments, the polynucleotide is packaged in a lipid nanoparticle or a viral vector. In some embodiments, the viral vector is an adenovirus, adeno-associated virus, lentivirus, or retrovirus vector. In some embodiments, the % sequence identity is calculated over the entirety of the reference sequence.

[0453] In some embodiments, the DNA the RNA, mRNA or circular RNA comprises one or more modified nucleosides. In some embodiments, up to 100% of the nucleotides comprising uracil are replaced with pseudouridine and/or N1-methylpseudouridine. In some embodiments, the polynucleotide is packaged in a lipid nanoparticle, a polymeric nanoparticle, an extracellular vesicle, optionally an exosome, or a viral vector, optionally a replicating viral vector or a non-replicating viral vector, optionally an adenovirus, adeno-associated virus, lentivirus, or retrovirus vector. Methods of making lipid nanoparticles for RNA delivery are known in the art. In some embodiments, the lipid nanoparticle is made from: an ionizable cationic lipid, a PEGylated lipid, a phospholipid, and cholesterol. In some embodiments, a neutral ionizable amino lipid is used. Lipid nanoparticles for RNA delivery are disclosed in, for example: U.S. Pat. No. 11,338,044B2; US20180153822A1; US20220249699A1; WO2022251953A1; Mitchell et al., “Engineering precision nanoparticles for drug delivery,” Nature Rev. Drug Discovery (2021) 20:101-124; Kulkarni et al., “Lipid Nanoparticles Enabling Gene Therapies: From Concepts to Clinical Utility,” Nucleic Acid Therapeutics (2018) 28 (3): 146-157; Hou et al. “Lipid nanoparticles for mRNA delivery,” Nature Reviews Materials (2021) 6:1078-1094; each of which is incorporated herein by reference in its entirety.

### Exemplary Pharmaceutical Compositions, Uses, and Methods

[0454] Also disclosed herein in some embodiments are pharmaceutical compositions comprising any of the polypeptides, the bifunctional polypeptides and/or the polynucleotides disclosed herein and one or more pharmaceutically acceptable excipients, carriers, or diluents. Disclosed herein are pharmaceutical compositions comprising any of the bifunctional polypeptides and/or polynucleotides disclosed herein and one or more pharmaceutically acceptable excipients, carriers, or diluents. In some embodiments, the composition is formulated for intravenous, intraperitoneal, intra-arterial, subcutaneous, intramuscular, intrathecal, intratumoral, inhalation, or intracranial administration.

[0455] In some embodiments, the polypeptide, bifunctional polypeptide, polynucleotide, or pharmaceutical composition disclosed herein is for use in the treatment of a cancer or neurodegenerative disease, optionally Huntington's disease, in a patient in need thereof. In some embodiments, the polypeptide, bifunctional polypeptide, polynucleotide, or pharmaceutical composition disclosed herein is for use in the manufacture of a medicament. In some embodiments, the medicament is for the treatment of cancer. In some embodiments, the medicament is for the treatment of a neurodegenerative disease, optionally Huntington's disease.

[0456] Disclosed herein in some embodiments, is a method of treating a subject comprising administering the polypeptide, bifunctional polypeptide, polynucleotide, or pharmaceutical composition disclosed herein to a subject in need thereof. In some embodiments, the subject has a cancer. In some embodiments, the subject has a neurodegenerative disease, optionally Huntington's disease.

[0457] Disclosed herein in some embodiments, is a method of reducing the amount of a target protein in a cell comprising contacting the cell with the polypeptide, bifunctional polypeptide, polynucleotide, or pharmaceutical composition disclosed herein. In some embodiments, the target protein is selected from MYC, (optionally c-MYC), CTNNB1, FOXP3, and/or HTT. In some embodiments, the target protein is PCNA. In some embodiments, the cell is in a subject, and the contacting comprises administering the polypeptide, bifunctional polypeptide, polynucleotide, or pharmaceutical composition to the subject. In some embodiments, the subject has cancer. In some embodiments, the subject has a neurodegenerative disease, optionally Huntington's disease. In some embodiments, the administering is intravenous, intraperitoneal, intra-arterial, subcutaneous, intramuscular, intrathecal, or intracranial administration. In some embodiments, the cell is ex vivo, and said contacting comprises contacting the polypeptide, bifunctional polypeptide, polynucleotide, or pharmaceutical composition to the cell ex vivo, optionally in an adoptive cell therapy. In some embodiments, the method further comprises administering the cell to a subject after the contacting step, optionally wherein the subject is also the source of the cell.

[0458] In some embodiments, in the polypeptide, bifunctional polypeptide, polynucleotide, pharmaceutical composition, or method disclosed herein the polypeptide or bifunctional polypeptide promotes proteasome-mediated degradation of the target protein when measured in one or more assays described in and Exemplary Assay for assessing proteasomal-mediated degradation of target protein disclosed herein. In some embodiments, the assay is a HiBiT™ tag assay. In some embodiments, the assay is a Western blot, optionally wherein the proteasome-mediated degradation is inhibited when the cells comprising the target protein and the bifunctional polypeptide are treated with a proteasome inhibitor. In some embodiments, the treatment with the proteasome inhibitor reduces the amount of degradation of the target protein by at least 50%, 60%, 70%, 80%, 90%, 95% or 100% as compared to cells not treated with the proteasome inhibitor.

### Exemplary Assays for Assessing Proteasomal-Mediated Degradation of Target Protein

[0459] The following is an embodiment of exemplary assays for determining if a bifunctional polypeptide promotes proteasomal-mediated degradation of a target protein and therefore that the URD retains ubiquitin-proteasome recruiting activity.

[0460] As used herein, a URD is a domain derived from a ubiquitin-proteasome system component that has the physical property of recruiting the ubiquitin-proteasome system machinery and the functional property of enabling the polyubiquitination and degradation of the recruited target of interest.

[0461] In an exemplary screening assay, the target of interest (either endogenous or exogenous target) is engineered to harbor the HiBIT tag (Promega) in a relevant cell line. The cell line is transfected with a plasmid encoding the bifunctional polypeptide designed to promote proteasome-mediated degradation of the target of interest. After 24 to 72 hours, the HiBiT assay is performed according to manufacturer instructions. Loss of HiBiT signal is indicative that the bifunctional polypeptide promotes proteasome-mediated degradation of the target, and that the URD retains ubiquitin-proteasome recruiting activity. A construct that leads to loss of HiBiT signal can be subjected to further confirmation in the assay described below. Additional information regarding the HiBIT system can be found in Dixon et al. NanoLuc Complementation Reporter Optimized for Accurate Measurement of Protein Interactions in Cells. ACS Chem Biol. (2016) 11 (2): 400-8, which is hereby expressly incorporated by reference in its entirety

[0462] An exemplary assay for confirmation of proteasome-mediated degradation of the bifunctional polypeptides is described. This assay can be used in addition to the assay described above, or independent of the above assay. After a suitable time to allow proteasome-mediated degradation of the target of interest (e.g., 24 to 72 hours), lysate of cells expressing the target and the bifunctional polypeptide of interest, and control cells that express the target of interest but not the bifunctional polypeptide of interest, are subjected to SDS-PAGE, transferred onto a suitable membrane, and probed with antibodies that are specific and selective for the target of interest (Western Blot). Loss of target protein is indicative that the bifunctional polypeptide promotes proteasome-mediated degradation of the target, and that the URD retains ubiquitin-proteasome recruiting activity. In some embodiments, to demonstrate that the target loss is proteasome dependent, cells expressing the target and the bifunctional polypeptide of interest are treated with a proteasome inhibitor such as bortezomib, MG-132, or lactacystin. The cells expressing the target and the bifunctional polypeptide of interest in the presence of the proteasome inhibitor will show a partial (e.g., at least 50%, 60%, 70%, 80%, 90%, or 95%) or total (100%) reduction in amount of degradation as compared to cells not treated with the proteasome inhibitor, which indicates that the loss of the target is proteasome-dependent, which is indicative that the bifunctional polypeptide promotes proteasome-mediated degradation of the target, and that the URD retains ubiquitin-proteasome recruiting activity. For example, if the cells expressing the target and the bifunctional polypeptide of interest in the absence of a proteasome inhibitor reduce the target protein by 90% relative to control cells that express the target of interest but not the bifunctional polypeptide of interest, but only by 9% in the presence of a proteasome inhibitor, the proteasome inhibitor reduced the amount of degradation by 90% ((90%-9%)/90%=90%).

### Terms

[0463] In the following detailed description, reference is made to the accompanying drawings, which form a part hereof. In the drawings, similar symbols typically identify similar components, unless context dictates otherwise. The illustrative embodiments described in the detailed description, drawings, and claims are not meant to be limiting. Other embodiments may be utilized, and other changes may be made, without departing from the spirit or scope of the subject matter presented herein. It will be readily understood that the aspects of the present disclosure, as generally described herein, and illustrated in the Figures, can be arranged, substituted, combined, separated, and designed in a wide variety of different configurations, all of which are explicitly contemplated herein.

[0464] Unless defined otherwise, all technical and scientific terms used herein have the same meaning as is commonly understood by one of skill in the art to which the claimed subject matter belongs when read in light of the current disclosure. It is to be understood that the foregoing general description and the following detailed description are exemplary and explanatory only and are not restrictive of any subject matter claimed.

[0465] The section headings used herein are for organizational purposes only and are not to be construed as limiting the subject matter described.

[0466] The articles “a” and “an” are used herein to refer to one or to more than one (for example, at least one) of the grammatical object of the article. By way of example, “an element” means one element or more than one element.

[0467] By “about” is meant a quantity, level, value, number, frequency, percentage, dimension, size, amount, weight or length that is approximately the recited value, which can vary by as much as 30, 25, 20, 15, 10, 9, 8, 7, 6, 5, 4, 3, 2 or 1% of the recited value. Where it is not clear from the context what is encompassed by “about,” it will mean the value recited +/−10%.

[0468] Throughout this specification, unless the context requires otherwise, the words “comprise,” “comprises.” and “comprising” will be understood to imply the inclusion of a stated step or element or group of steps or elements but not the exclusion of any other step or element or group of steps or elements. By “consisting of”′ is meant including, and limited to, whatever follows the phrase “consisting of.” Thus, the phrase “consisting of” indicates that the listed elements are required or mandatory, and that no other elements may be present. By “consisting essentially of” is meant including any elements listed after the phrase and limited to other elements that do not interfere with or contribute to the activity or action specified in the disclosure for the listed elements. Thus, the phrase “consisting essentially of” indicates that the listed elements are required or mandatory, but that other elements are optional and may or may not be present depending upon whether or not they materially affect the activity or action of the listed elements.

[0469] The terms “individual”, “subject”, or “patient” as used herein have their plain and ordinary meaning as understood in light of the specification, and mean a human or a non-human mammal, e.g., a dog, a cat, a mouse, a rat, a cow, a sheep, a pig, a goat, a non-human primate, or a bird, e.g., a chicken, as well as any other vertebrate or invertebrate. The term “mammal” is used in its usual biological sense. Thus, it specifically includes, but is not limited to, primates, including simians (chimpanzees, apes, monkeys) and humans, cattle, horses, sheep, goats, swine, rabbits, dogs, cats, rodents, rats, mice, guinea pigs, or the like

[0470] As used herein, the term “isolated” has its plain and ordinary meaning as understood in light of the specification, and refers to a substance and/or entity that has been (1) separated from at least some of the components with which it was associated when initially produced (whether in nature and/or in an experimental setting), and/or (2) produced, prepared, and/or manufactured by the hand of man. Isolated substances and/or entities may be separated from equal to, about, at least, at least about, not more than, or not more than about, 10%, about 20%, about 30%, about 40%, about 50%, about 60%, about 70%, about 80%, about 90%, about 95%, about 98%, about 99%, substantially 100%, or 100% of the other components with which they were initially associated (or ranges including and/or spanning the aforementioned values). In some embodiments, isolated agents are, are about, are at least, are at least about, are not more than, or are not more than about 80%, about 85%, about 90%, about 91%, about 92%, about 93%, about 94%, about 95%, about 96%, about 97%, about 98%, about 99%, substantially 100%, or 100% pure (or ranges including and/or spanning the aforementioned values). As used herein, a substance that is “isolated” may be “pure” (e.g., substantially free of other components). As used herein, the term “isolated cell” may refer to a cell not contained in a multi-cellular organism or tissue.

[0471] As used herein, “in vivo” is given its plain and ordinary meaning as understood in light of the specification and refers to the performance of a method inside living organisms, usually animals, mammals, including humans, and plants, as opposed to a tissue extract or dead organism.

[0472] As used herein, “ex vivo” is given its plain and ordinary meaning as understood in light of the specification and refers to the performance of a method outside a living organism with little alteration of natural conditions.

[0473] As used herein, “in vitro” is given its plain and ordinary meaning as understood in light of the specification and refers to the performance of a method outside of biological conditions, e.g., in a petri dish or test tube.

[0474] The terms “nucleic acid” or “nucleic acid molecule” as used herein have their plain and ordinary meaning as understood in light of the specification, and refer to polynucleotides, such as deoxyribonucleic acid (DNA) or ribonucleic acid (RNA), oligonucleotides, those that appear in a cell naturally, fragments generated by the polymerase chain reaction (PCR), and fragments generated by any of ligation, scission, endonuclease action, and exonuclease action. Nucleic acid molecules can be composed of monomers that are naturally occurring nucleotides (such as DNA and RNA), or analogs of naturally occurring nucleotides (e.g., enantiomeric forms of naturally occurring nucleotides), or a combination of both. Modified nucleotides can have alterations in sugar moieties and/or in pyrimidine or purine base moieties. Sugar modifications include, for example, replacement of one or more hydroxyl groups with halogens, alkyl groups, amines, and azido groups, or sugars can be functionalized as ethers or esters. Moreover, the entire sugar moiety can be replaced with sterically and electronically similar structures, such as aza-sugars and carbocyclic sugar analogs. Examples of modifications in a base moiety include alkylated purines and pyrimidines, acylated purines or pyrimidines, or other well-known heterocyclic substitutes. Nucleic acid monomers can be linked by phosphodiester bonds or analogs of such linkages. Analogs of phosphodiester linkages include phosphorothioate, phosphorodithioate, phosphoroselenoate, phosphorodiselenoate, phosphoroanilothioate, phosphoranilidate, or phosphoramidate. The term “nucleic acid molecule” also includes so-called “peptide nucleic acids,” which comprise naturally occurring or modified nucleic acid bases attached to a polyamide backbone. Nucleic acids can be either single stranded or double stranded. “Oligonucleotide” can be used interchangeable with nucleic acid and can refer to either double stranded or single stranded DNA or RNA. A nucleic acid or nucleic acids can be contained in a nucleic acid vector or nucleic acid construct (e.g. plasmid, virus, retrovirus, lentivirus, bacteriophage, cosmid, fosmid, phagemid, bacterial artificial chromosome (BAC), yeast artificial chromosome (YAC), or human artificial chromosome (HAC)) that can be used for amplification and/or expression of the nucleic acid or nucleic acids in various biological systems. Typically, the vector or construct will also contain elements including but not limited to promoters, enhancers, terminators, inducers, ribosome binding sites, translation initiation sites, start codons, stop codons, polyadenylation signals, origins of replication, cloning sites, multiple cloning sites, restriction enzyme sites, epitopes, reporter genes, selection markers, antibiotic selection markers, targeting sequences, peptide purification tags, or accessory genes, or any combination thereof.

[0475] A nucleic acid or nucleic acid molecule can comprise one or more sequences encoding different peptides, polypeptides, or proteins. These one or more sequences can be joined in the same nucleic acid or nucleic acid molecule adjacently, or with extra nucleic acids in between, e.g. linkers, repeats or restriction enzyme sites, or any other sequence that is, is about, is at least, is at least about, is not more than, or is not more than about, 1, 2, 3, 4, 5, 6, 7, 8, 9, 10, 11, 12, 13, 14, 15, 16, 17, 18, 19, 20, 25, 30, 35, 40, 45, 50, 55, 60, 65, 70, 75, 80, 85, 90, 95, 100, 150, 200, or 300 bases long, or any length in a range defined by any two of the aforementioned lengths. The term “downstream” on a nucleic acid as used herein has its plain and ordinary meaning as understood in light of the specification and refers to a sequence being after the 3′-end of a previous sequence, on the strand containing the encoding sequence (sense strand) if the nucleic acid is double stranded. The term “upstream” on a nucleic acid as used herein has its plain and ordinary meaning as understood in light of the specification and refers to a sequence being before the 5′-end of a subsequent sequence, on the strand containing the encoding sequence (sense strand) if the nucleic acid is double stranded. The term “grouped” on a nucleic acid as used herein has its plain and ordinary meaning as understood in light of the specification and refers to two or more sequences that occur in proximity either directly or with extra nucleic acids in between, e.g. linkers, repeats, or restriction enzyme sites, or any other sequence that is, is about, is at least, is at least about, is not more than, or is not more than about, 1, 2, 3, 4, 5, 6, 7, 8, 9, 10, 11, 12, 13, 14, 15, 16, 17, 18, 19, 20, 25, 30, 35, 40, 45, 50, 55, 60, 65, 70, 75, 80, 85, 90, 95, 100, 150, 200, or 300 bases long, or any length in a range defined by any two of the aforementioned lengths, but generally not with a sequence in between that encodes for a functioning or catalytic polypeptide, protein, or protein domain.

[0476] The nucleic acids described herein comprise nucleobases. Primary, canonical, natural, or unmodified bases are adenine, cytosine, guanine, thymine, and uracil. Other nucleobases include but are not limited to purines, pyrimidines, modified nucleobases, 5-methylcytosine, pseudouridine, dihydrouridine, inosine, 7-methylguanosine, hypoxanthine, xanthine, 5,6-dihydrouracil, 5-hydroxymethylcytosine, 5-bromouracil, isoguanine, isocytosine, aminoallyl bases, dye-labeled bases, fluorescent bases, or biotin-labeled bases. In some embodiments, the uridine of the RNA, mRNA or circular RNA is pseudouridine. In some embodiments, the uridine of the RNA, mRNA or circular RNA is N1-methylpseudouridine. In some embodiments, the uracil of the RNA, mRNA or circular RNA is a mixture of pseudouridine and N1-methylpseudouridine. In some embodiments, up to 100% of the nucleotides comprising uracil are replaced with pseudouridine and/or N1-methylpseudouridine.

[0477] The terms “peptide”, “polypeptide”, and “protein” as used herein have their plain and ordinary meaning as understood in light of the specification and refer to macromolecules comprised of amino acids linked by peptide bonds. The numerous functions of peptides, polypeptides, and proteins are known in the art, and include but are not limited to enzymes, structure, transport, defense, hormones, or signaling. Peptides, polypeptides, and proteins are often, but not always, produced biologically by a ribosomal complex using a nucleic acid template, although chemical syntheses are also available. By manipulating the nucleic acid template, peptide, polypeptide, and protein mutations such as substitutions, deletions, truncations, additions, duplications, or fusions of more than one peptide, polypeptide, or protein can be performed. These fusions of more than one peptide, polypeptide, or protein can be joined in the same molecule adjacently, or with extra amino acids in between, e.g. linkers, repeats, epitopes, or tags, or any other sequence that is, is about, is at least, is at least about, is not more than, or is not more than about, 1, 2, 3, 4, 5, 6, 7, 8, 9, 10, 11, 12, 13, 14, 15, 16, 17, 18, 19, 20, 25, 30, 35, 40, 45, 50, 55, 60, 65, 70, 75, 80, 85, 90, 95, 100, 150, 200, or 300 bases long, or any length in a range defined by any two of the aforementioned lengths. The term “downstream” on a polypeptide as used herein has its plain and ordinary meaning as understood in light of the specification and refers to a sequence being after the C-terminus of a previous sequence. The term “upstream” on a polypeptide as used herein has its plain and ordinary meaning as understood in light of the specification and refers to a sequence being before the N-terminus of a subsequent sequence.

[0478] A polypeptide or amino acid sequence “derived from” a designated protein refers to the origin of the polypeptide. Preferably, the polypeptide has an amino acid sequence that is essentially identical to that of a polypeptide encoded in the sequence, or a portion thereof, or which is immunologically identifiable with a polypeptide encoded in the sequence. This terminology also includes a polypeptide expressed from a designated nucleic acid sequence. Peptide sequences having at least 80%, 81%, 82%, 83%, 84%, 85%, 86%, 87%, 88%, 89%, 90%, 91%, 92%, 93%, 94%, 95%, 96%, 97%, 98%, 99%, or 100% homology to any one of the peptide sequences disclosed herein and having the same or similar functional properties are envisioned. The percent homology may be determined according to amino acid substitutions, deletions, or additions between two peptide sequences. Peptide sequences having some percent homology to any one of the peptide sequences disclosed herein may be produced and tested by one skilled in the art through conventional methods.

[0479] The term “artificial” or “non-natural” denotes that the polypeptide or portion of a polypeptide in question has a sequence that is not present, in the noted state, in nature. In the present context the polypeptides have been altered from their native state, so that their sequences are no longer those found in wild-type proteins Where a portion derived from a naturally occurring protein (e.g., a URD or NLS) is a fragment of the naturally occurring protein which does not contain an altered sequence (other than being less than the complete sequence of the naturally occurring protein), a “non-natural” polypeptide comprising the derived portion does not encompass the naturally occurring protein from which the portion is derived. That is to say that a “non-natural” polypeptide comprising the portion must contain additional amino acids which are not found in the natural protein.

[0480] As disclosed herein, sequences having a % identity to any of the sequences disclosed herein are envisioned and may be used. The terms “% identity” refer to the percentage of units (i.e., amino acids or nucleotides) that are the same between two or more sequences relative to the length of the sequence. When the two or more sequences being compared are the same length, the % identity will be respective to that length. When two or more sequences being compared are different lengths, deletions and/or insertions may be introduced to obtain the best alignment. In some embodiments, these sequences may include peptide sequences, nucleic acid sequences, CDR sequences, variable region sequences, or heavy or light chain sequences. In some embodiments, any sequence having at least 80%, 81%, 82%, 83%, 84%, 85%, 86%, 87%, 88%, 89%, 90%, 91%, 92%, 93%, 94%, 95%, 96%, 97%, 98%, 99%, or 100% sequence identity to any of the sequences disclosed herein may be used. In some embodiments, any sequence having at least 0, 1, 2, 3, 4, 5, 6, 7, 8, 9, 10, 11, 12, 13, 14, 15, 16, 17, 18, 19, 20, 21, 22, 23, 24, 25, 26, 27, 28, 29, 30, 31, 32, 33, 34, 35, 36, 37, 38, 39, 40, 41, 42, 43, 44, 45, 46, 47, 48, 49, or 50 substitutions, deletions, or additions relative to any of the sequences disclosed herein may be used. The changes in sequences may apply to, for example, single amino acids, single nucleic acid bases, or nucleic acid codons; however, differences in longer stretches of sequences are also envisioned. As applied to sequences associated with antibodies or binding regions thereof, these differences in sequences may apply to antigen-binding regions (e.g., CDRs) or regions that do not bind to antigens or are only secondary to antigen binding (e.g., framework regions).

[0481] As disclosed herein, sequences having a % homology to any of the sequences disclosed herein are envisioned and may be used. The term “% homology” refers to the degree of conservation between two sequences when considering their three-dimensional structure. For example, homology between two protein sequences may be dependent on structural motifs, such as beta strands, alpha helices, and other folds, as well as their distribution throughout the sequence. Homology may be determined through structural determination, either empirically or in silico. In some embodiments, any sequence having at least 80%, 81%, 82%, 83%, 84%, 85%, 86%, 87%, 88%, 89%, 90%, 91%, 92%, 93%, 94%, 95%, 96%, 97%, 98%, 99%, or 100% sequence homology to any of the sequences disclosed herein may be used. In some embodiments, any sequence having at least 0, 1, 2, 3, 4, 5, 6, 7, 8, 9, 10, 11, 12, 13, 14, 15, 16, 17, 18, 19, 20, 21, 22, 23, 24, 25, 26, 27, 28, 29, 30, 31, 32, 33, 34, 35, 36, 37, 38, 39, 40, 41, 42, 43, 44, 45, 46, 47, 48, 49, or 50 substitutions, deletions, or additions relative to any of the sequences disclosed herein, which may or may not affect the overall % homology, may be used.

[0482] As applied herein, sequences having a certain % similarity to any of the sequence disclosed herein are envisioned and may be used. In some embodiments, these sequences may include peptide sequences, nucleic acid sequences, CDR sequences, variable region sequences, or heavy or light chain sequences. As understood in the art with respect to peptide sequences, “similarity” refers to the comparison of amino acids based on their properties, including but not limited to size, polarity, charge, pK, aromaticity, hydrogen bonding properties, or presence of functional groups (e.g., hydroxyl, thiol, amine, carboxyl, and the like). The term “% similarity” refers to the percentage of units (e.g., amino acids) that are the same between two or more sequences relative to the length of the sequence. When the two or more sequences being compared are the same length, the % similarity will be respective that length. When two or more sequences being compared are different lengths, deletions and/or insertions may be introduced to obtain the best alignment. The similarity of two amino acids may dictate whether a certain substitution is conservative or non-conservative. Methods of determining the conservativeness of an amino acid substitution are generally known in the art and may involve substitution matrices. Commonly used substitution matrices include BLOSUM45, BLOSUM62, BLOSUM80, PAM100, PAM120, PAM160, PAM200, PAM250, but other substitution matrices or approaches may be used as considered appropriate by the skilled person A certain substitution matrix may be preferential over the others when considering aspects such as stringency, conservation and/or divergence of related sequences (e.g., within the same species or broader), and length of the sequences in question. As used herein, a peptide sequence having a certain % similarity to another sequence will have up to that % of amino acids that are either identical or an acceptable substitution as governed by the method of similarity determination used. In some embodiments, a sequence having at least 80%, 81%, 82%, 83%, 84%, 85%, 86%, 87%, 88%, 89%, 90%, 91%, 92%, 93%, 94%, 95%, 96%, 97%, 98%, 99%, or 100% sequence similarity to any of the sequences disclosed herein may be used. In some embodiments, any sequence having at least 0, 1, 2, 3, 4, 5, 6, 7, 8, 9, 10, 11, 12, 13, 14, 15, 16, 17, 18, 19, 20, 21, 22, 23, 24, 25, 26, 27, 28, 29, 30, 31, 32, 33, 34, 35, 36, 37, 38, 39, 40, 41, 42, 43, 44, 45, 46, 47, 48, 49, or 50 similar substitutions relative to any of the sequences disclosed herein may be used. As applied to sequences associated with antibodies or binding regions thereof, these similar substitutions may apply to antigen-binding regions (i.e., CDRs) or regions that do not bind to antigens or are only secondary to antigen binding (i.e., framework regions). In some embodiments, the percent identity is over the CDR and/or FR regions noted herein. In such situations, the percent identity of the CDR or FR can be identified separately from the rest of the protein or nucleic acid sequence. Thus, two CDRs or FRs can have a specified percentage of amino acid residues or nucleotides that are the same (for example, 70%, 75%, 80%, 85%, 90%, 95%, 96%, 97%, 98% or 99% sequence identity over a specified region, or, when not specified, over the entire sequence of a reference sequence), while allowing for the remainder of the protein to either stay 100% identical to the comparison protein, our while also allowing the remainder of the protein to also have variation by a specified percent identity.

[0483] The term “consensus sequence” as used herein with regard to sequences has its plain and ordinary meaning as understood in light of the specification, and refers to the generalized sequence representing all of the different combinations of permissible amino acids at each location of a group of sequences. A consensus sequence may provide insight into the conserved regions of related sequences where the unit (e.g., amino acid or nucleotide) is the same in most or all of the sequences, and regions that exhibit divergence between sequences. In the case of sequences associated with antibodies or binding regions thereof, the consensus sequence of a CDR may indicate amino acids that are important or dispensable for antigen binding. It is envisioned that consensus sequences may be prepared with any of the sequences provided herein, and the resultant various sequences derived from the consensus sequence can be validated to have similar effects as the template sequences.

[0484] The term “purity” of any given substance, compound, or material as used herein has its plain and ordinary meaning as understood in light of the specification and refers to the actual abundance of the substance, compound, or material relative to the expected abundance. For example, the substance, compound, or material may be at least 80, 85, 90, 91, 92, 93, 94, 95, 96, 97, 98, 99, or 100% pure, including all decimals in between. Purity may be affected by unwanted impurities, including but not limited to nucleic acids, DNA, RNA, nucleotides, proteins, polypeptides, peptides, amino acids, lipids, cell membrane, cell debris, small molecules, degradation products, solvent, carrier, vehicle, or contaminants, or any combination thereof. In some embodiments, the substance, compound, or material is substantially free of host cell proteins, host cell nucleic acids, plasmid DNA, contaminating viruses, proteasomes, host cell culture components, process related components, mycoplasma, pyrogens, bacterial endotoxins, and adventitious agents. Purity can be measured using technologies including but not limited to electrophoresis, SDS-PAGE, capillary electrophoresis, PCR, rtPCR, qPCR, chromatography, liquid chromatography, gas chromatography, thin layer chromatography, enzyme-linked immunosorbent assay (ELISA), spectroscopy, UV-visible spectrometry, infrared spectrometry, mass spectrometry, nuclear magnetic resonance, gravimetry, or titration, or any combination thereof.

[0485] The term “yield” of any given substance, compound, or material as used herein has its plain and ordinary meaning as understood in light of the specification and refers to the actual overall amount of the substance, compound, or material relative to the expected overall amount. For example, the yield of the substance, compound, or material is, is about, is at least, is at least about, is not more than, or is not more than about, 80, 85, 90, 91, 92, 93, 94, 95, 96, 97, 98, 99, or 100% of the expected overall amount, including all decimals in between. Yield may be affected by the efficiency of a reaction or process, unwanted side reactions, degradation, quality of the input substances, compounds, or materials, or loss of the desired substance, compound, or material during any step of the production.

[0486] The terms “effective amount” or “effective dose” as used herein have their plain and ordinary meaning as understood in light of the specification, and refer to that amount of a recited composition or compound that results in an observable effect. Actual dosage levels of active ingredients in an active composition of the presently disclosed subject matter can be varied so as to administer an amount of the active composition or compound that is effective to achieve the desired response for a particular subject and/or application. The selected dosage level will depend upon a variety of factors including, but not limited to, the activity of the composition, formulation, route of administration, combination with other drugs or treatments, severity of the condition being treated, and the physical condition and prior medical history of the subject being treated. In some embodiments, a minimal dose is administered, and dose is escalated in the absence of dose-limiting toxicity to a minimally effective amount. Determination and adjustment of an effective dose, as well as evaluation of when and how to make such adjustments, are contemplated herein.

[0487] The terms “function” and “functional” as used herein have their plain and ordinary meaning as understood in light of the specification, and refer to a biological, enzymatic, or therapeutic function.

[0488] The term “inhibit” as used herein has its plain and ordinary meaning as understood in light of the specification, and may refer to the reduction or prevention of a biological activity. The reduction can be by a percentage that is, is about, is at least, is at least about, is not more than, or is not more than about, 10%, 20%, 30%, 40%, 50%, 60%, 70%, 80%, 90%, or 100%, or an amount that is within a range defined by any two of the aforementioned values. As used herein, the term “delay” has its plain and ordinary meaning as understood in light of the specification, and refers to a slowing, postponement, or deferment of a biological event, to a time which is later than would otherwise be expected. The delay can be a delay of a percentage that is, is about, is at least, is at least about, is not more than, or is not more than about, 0%, 10%, 20%, 30%, 40%, 50%, 60%, 70%, 80%, 90%, 100%, or an amount within a range defined by any two of the aforementioned values. The terms inhibit and delay may not necessarily indicate a 100% inhibition or delay. A partial inhibition or delay may be realized.

[0489] As used herein, the terms “treating” or “treatment” have their plain and ordinary meaning as understood in light of the specification, and refer to an approach for obtaining beneficial or desired results in a subject's condition, including clinical results. Beneficial or desired clinical results can include, but are not limited to, alleviation or amelioration of one or more symptoms or conditions, diminishment of the extent of a disease, stabilizing (i.e., not worsening) the state of disease, prevention of a disease's transmission or spread, delaying or slowing of disease progression, amelioration or palliation of the disease state, diminishment of the recurrence of disease, and remission, whether partial or total and whether detectable or undetectable. “Treating” and “treatment” as used herein also include prophylactic treatment. Treatment methods comprise administering to a subject a therapeutically effective amount of an active agent. The administering step may consist of a single administration or may comprise a series of administrations. The compositions are administered to the subject in an amount and for a duration sufficient to treat the subject. The length of the treatment period depends on a variety of factors, such as the severity of the condition, the age and genetic profile of the subject, the concentration of active agent, the activity of the compositions used in the treatment, or a combination thereof. It will also be appreciated that the effective dosage of an agent used for the treatment or prophylaxis may increase or decrease over the course of a particular treatment or prophylaxis regime. Changes in dosage may result and become apparent by standard diagnostic assays known in the art. In some instances, chronic administration may be required.

[0490] “Tumor,” as used herein, plain and ordinary meaning as understood in light of the specification, and refers to all neoplastic cell growth and proliferation, whether malignant or benign, and all pre-cancerous and cancerous cells and tissues. The terms “cancer,” “cancerous,” “cell proliferative disorder,” “proliferative disorder” and “tumor” are not mutually exclusive as referred to herein. The term “neoplasia” encompasses the term tumor.

[0491] The terms “cancer” and “cancerous” plain and ordinary meaning as understood in light of the specification, and refer to or describe the physiological condition in mammals that is typically characterized by unregulated cell growth. Examples of cancer include, but are not limited to, carcinoma, lymphoma, blastoma, sarcoma, and leukemia or lymphoid malignancies. More particular examples of such cancers include lung cancer including small-cell lung cancer, non-small cell lung cancer and lung adenocarcinomas with neuroendocrine features; neuroendocrine prostate cancer, melanoma, gliomas, low-grade gliomas and glioblastoma, medullary thyroid cancer, carcinoid tumors, neuroendocrine tumors in the pancreas, bladder cancer, testicular cancer squamous cell cancer (e.g. epithelial squamous cell cancer), neuroendocrine neoplasms, such as neuroendocrine tumors of unknown primary, neuroendocrine neoplasms of the small bowel, carotid body, adrenal gland, colorectal gynecological organ, abdomen, esophagus, GI tract, bile duct, nervous system, appendix, liver, anal, thymus, ileocecal junction, head and neck, breast, peritoneum and retroperitoneum, kidney, thyroid, stomach, bone, adenocarcinomas, such as adenocarcinoma of the lung and squamous carcinoma of the lung, cancer of the peritoneum, hepatocellular cancer, gastric or stomach cancer including gastrointestinal cancer, pancreatic cancer, glioblastoma, cervical cancer, ovarian cancer, liver cancer, bladder cancer, cancer of the urinary tract, hepatoma, breast cancer, colon cancer, rectal cancer, colorectal cancer, endometrial or uterine carcinoma, salivary gland carcinoma, kidney or renal cancer, prostate cancer, vulval cancer, thyroid cancer, bone cancer, hepatic carcinoma, anal carcinoma, penile carcinoma, melanoma, multiple myeloma and B-cell lymphoma, brain, as well as head and neck cancer, and associated metastases. The term cancer includes adult and pediatric solid cancers. In some embodiments, the cancer can be a solid tumor. In some embodiments, the cancer is a highly fibrotic tumor or cancer. In some embodiments, the cancer is a desmoplasia.

[0492] As used herein, the term “therapeutic target” refers to a gene or gene product that, upon modulation of its activity (e.g., by modulation of expression, biological activity, and the like), can provide for modulation of the disease phenotype. As used throughout, “modulation” is meant to refer to an increase or a decrease in the indicated phenomenon (e.g., modulation of a biological activity refers to an increase in a biological activity or a decrease in a biological activity).

[0493] The term “administering” includes oral administration, topical contact, administration as a suppository, intravenous, intraperitoneal, intramuscular, intralesional, intrathecal, intranasal, or subcutaneous administration, or the implantation of a slow-release device, e.g., a mini-osmotic pump, to a subject. Administration is by any route, including parenteral and transmucosal (e.g., buccal, sublingual, palatal, gingival, nasal, vaginal, rectal, or transdermal). Parenteral administration includes, e.g., intravenous, intramuscular, intra-arteriole, intradermal, subcutaneous, intraperitoneal, intraventricular, and intracranial. Other modes of delivery include, but are not limited to, the use of liposomal formulations, intravenous infusion, transdermal patches, etc. By “co-administer” it is meant that a first compound described herein is administered at the same time, just prior to, or just after the administration of a second compound described herein.

[0494] As used herein, “pharmaceutically acceptable” has its plain and ordinary meaning as understood in light of the specification and refers to carriers, excipients, and/or stabilizers that are nontoxic to the cell or mammal being exposed thereto at the dosages and concentrations employed or that have an acceptable level of toxicity. A “pharmaceutically acceptable” “diluent,” “excipient,” and/or “carrier” as used herein have their plain and ordinary meaning as understood in light of the specification and are intended to include any and all solvents, dispersion media, coatings, antibacterial and antifungal agents, isotonic and absorption delaying agents, and the like, compatible with administration to humans, cats, dogs, or other vertebrate hosts. Typically, a pharmaceutically acceptable diluent, excipient, and/or carrier is a diluent, excipient, and/or carrier approved by a regulatory agency of a Federal, a state government, or other regulatory agency, or listed in the U.S. Pharmacopeia or other generally recognized pharmacopeia for use in animals, including humans as well as non-human mammals, such as cats and dogs. The term diluent, excipient, and/or carrier can refer to a diluent, adjuvant, excipient, or vehicle with which the pharmaceutical formulation is administered. Such pharmaceutical diluent, excipient, and/or carriers can be sterile liquids, such as water and oils, including those of petroleum, animal, vegetable or synthetic origin. Water, saline solutions and aqueous dextrose and glycerol solutions can be employed as liquid diluents, excipients, and/or carriers, particularly for injectable solutions. Suitable pharmaceutical diluents and/or excipients include sugars, starch, glucose, fructose, lactose, sucrose, maltose, gelatin, malt, rice, flour, chalk, silica gel, sodium stearate, glycerol monostearate, talc, salts, sodium chloride, dried skim milk, glycerol, propylene, glycol, water, ethanol and the like. A non-limiting example of a physiologically acceptable carrier is an aqueous pH buffered solution. The physiologically acceptable carrier may also comprise one or more of the following: antioxidants, such as ascorbic acid, low molecular weight (less than about 10 residues) polypeptides, proteins, such as serum albumin, gelatin, immunoglobulins, hydrophilic polymers such as polyvinylpyrrolidone, amino acids, carbohydrates such as glucose, mannose, or dextrins, chelating agents such as EDTA, sugar alcohols such as glycerol, erythritol, threitol, arabitol, xylitol, ribitol, mannitol, sorbitol, galactitol, fucitol, iditol, inositol, isomalt, maltitol, or lactitol, salt-forming counterions such as sodium, and nonionic surfactants such as TWEEN®, polyethylene glycol (PEG), and PLURONICS®. The formulation, if desired, can also contain minor amounts of wetting, bulking, emulsifying agents, or pH buffering agents. These formulations can take the form of solutions, suspensions, emulsion, sustained release formulations and the like. The formulation should suit the mode of administration.

[0495] Additional excipients with desirable properties include but are not limited to preservatives, adjuvants, stabilizers, solvents, buffers, diluents, solubilizing agents, detergents, surfactants, chelating alcohols, agents, antioxidants, ketones, aldehydes, ethylenediaminetetraacetic acid (EDTA), citric acid, salts, sodium chloride, sodium bicarbonate, sodium phosphate, sodium borate, sodium citrate, potassium chloride, potassium phosphate, magnesium sulfate sugars, dextrose, fructose, mannose, lactose, galactose, sucrose, sorbitol, mannitol, cellulose, serum, amino acids, alanine, arginine, asparagine, aspartic acid, cysteine, glutamine, glutamic acid, glycine, histidine, isoleucine, leucine, lysine, methionine, phenylalanine, proline, serine, threonine, tryptophan, tyrosine, valine, polysorbate 20, polysorbate 40, polysorbate, 60, polysorbate 80, sodium deoxycholate, sodium taurodeoxycholate, magnesium stearate, octylphenol ethoxylate, benzethonium chloride, thimerosal, gelatin, esters, ethers, 2-phenoxyethanol, urea, or vitamins, or any combination thereof. Some excipients may be in residual amounts or contaminants from the process of manufacturing, including but not limited to serum, albumin, ovalbumin, antibiotics, inactivating agents, formaldehyde, glutaraldehyde, β-propiolactone, gelatin, cell debris, nucleic acids, peptides, amino acids, or growth medium components or any combination thereof. The amount of the excipient may be found in the formulation at a percentage that is, is about, is at least, is at least about, is not more than, or is not more than about, 0%, 0.1%, 0.2%, 0.3%, 0.4%, 0.5%, 0.6%, 0.7%, 0.8%, 0.9%, 1%, 2%, 3%, 4%, 5%, 6%, 7%, 8%, 9%, 10%, 20%, 30%, 40%, 50%, 60%, 70%, 80%, 90%, 95%, 100% w/w or any percentage by weight in a range defined by any two of the aforementioned numbers.

[0496] The term “pharmaceutically acceptable salts” has its plain and ordinary meaning as understood in light of the specification and includes relatively non-toxic, inorganic and organic acid, or base addition salts of compositions or excipients, including without limitation, analgesic agents, therapeutic agents, other materials, and the like. Examples of pharmaceutically acceptable salts include those derived from mineral acids, such as hydrochloric acid and sulfuric acid, and those derived from organic acids, such as ethanesulfonic acid, benzenesulfonic acid, p-toluenesulfonic acid, and the like. Examples of suitable inorganic bases for the formation of salts include the hydroxides, carbonates, and bicarbonates of ammonia, sodium, lithium, potassium, calcium, magnesium, aluminum, zinc, and the like Salts may also be formed with suitable organic bases, including those that are non-toxic and strong enough to form such salts. For example, the class of such organic bases may include but are not limited to mono-, di-, and trialkylamines, including methylamine, dimethylamine, and triethylamine; mono-, di-, or trihydroxyalkylamines including mono-, di-, and triethanolamine; amino acids, including glycine, arginine and lysine; guanidine; N-methylglucosamine; N-methylglucamine; L-glutamine; N-methylpiperazine; morpholine; ethylenediamine; N-benzylphenethylamine; trihydroxymethyl aminoethane.

[0497] The term “ubiquitin-proteasome recruiting activity” as used herein has its plain and ordinary meaning as understood in light of the specification and refers to the biological function of binding with proteins involved in the ubiquitination pathway to affect the ubiquitination of a target protein. More specifically in the embodiments disclosed herein, this generally applies to the ability of a peptide to recruit a ubiquitinated E2 ubiquitin-conjugating enzyme and catalyze the transfer of the ubiquitin from the E2 ubiquitin-conjugate enzyme to the target protein. The peptide having this ubiquitin-proteasome recruiting activity will therefore generally be a “ubiquitin-proteasome system recruiting domain (URD)”, where the URD has the ability to recruit a ubiquitin E2 ubiquitin-conjugating enzyme and catalyze the transfer of the ubiquitin from the E2 ubiquitin-conjugate enzyme to the target protein. In some embodiments provided herein, the URD is a portion, truncation, or fragment of a naturally occurring E3 ubiquitin ligase, where the portion, truncation, or fragment of the E3 ubiquitin ligase exhibits the ubiquitin-proteasome recruiting activity. The E3 ubiquitin ligase can be obtained from any source (e.g., from any eukaryote or archaea) but, in some embodiments, is preferably a human E3 ubiquitin ligase. Nevertheless, the URD may also be derived from a protein that is not a E3 ubiquitin ligase but has a similar function, such as a viral analogue of an E3 ubiquitin ligase (e.g., VIF from HIV). Different portions, truncations, or fragments of an E3 ubiquitin ligase or analogue may exhibit a ubiquitin-proteasome recruiting activity, and it would be within the capabilities of a skilled person to determine a certain portion, truncation, or fragment of an E3 ubiquitin ligase or analogue that is preferable for their uses (e.g., exhibiting better E2 ubiquitin-conjugating enzyme binding activity, reducing off-target or off-mechanism protein-protein interactions, and/or more efficiently catalyzing ubiquitination of a target protein). It is envisioned that the URDs or the portions, truncations, or fragments of the URDs and/or E3 ubiquitin ligases disclosed herein can be reasonably modified while still retaining their ubiquitin-proteasome recruiting activity, for example, by including or excluding amino acids from the N-terminus or C-terminus of the URD or the portion, truncation, or fragment of the URD and/or E3 ubiquitin ligase or performing amino acid substitutions to enhance various aspects of the URD and/or the portion, truncation, or fragment of the URD and/or E3 ubiquitin ligase such as protein folding, expression, or catalytic activity, optionally within the context of the bifunctional polypeptide.

[0498] The ubiquitin-proteasome recruiting activity of a certain URD and/or portion, truncation, or fragment of a URD and/or E3 ubiquitin ligase may be quantified or verified through methods generally known in the art. For example, activity may be observed by observing (a) loss of bioluminescent signal from a HiBiT-tagged intracellular target protein, (b) loss of target protein signature and/or presence of polyubiquitin chain in target protein by mass spectrometry, (c) ubiquitination of the target protein in cell or in recombinant in vitro assays, or (d) detecting ubiquitination of target protein by immunoprecipitation, upon introduction of a URD-containing polypeptide specific for a known target protein. These exemplary approaches are explored in Franklin et al. A High-Throughput Assay for Monitoring Ubiquitination in Real Time. Front. Chem. (2019) 7:816, Choo & Zhang. Detection of protein ubiquitination. J Vis. Exp. (2009) 30:1293, Udeshi et al. Large-scale identification of ubiquitination sites by mass spectrometry. Nat Protoc. (2013) 8 (10): 1950-60, and Riching et al. Quantitative Live-Cell Kinetic Degradation and Mechanistic Profiling of PROTAC Mode of Action. ACS Chem Biol. (2018) 13 (9): 2758-2770, each of which are expressly incorporated by reference in its entirety. In some embodiments, a URD that retains ubiquitin-proteasome recruiting activity has polyubiquitination activity against a target bound by its targeting moiety when measured in an assay disclosed in one of the preceding references. In some embodiments, a URD that retains ubiquitin-proteasome recruiting activity has polyubiquitination activity against a target bound by its targeting moiety when measured in an assay described in Exemplary Assays for assessing proteasomal-mediated degradation and/or Example 1. In some embodiments, a URD that retains ubiquitin-proteasome recruiting activity has polyubiquitination activity against a target bound by its targeting moiety when measured by Western blot (e.g., measuring the abundance of the target in cells). In some embodiments, a URD that retains ubiquitin-proteasome recruiting activity has polyubiquitination activity against a target bound by its targeting moiety when measured by Western blot, but where the target is partially or totally preserved when the cells comprising the URD and target are treated with a proteasome inhibitor.

[0499] The term “antibody” includes, but is not limited to, genetically engineered or otherwise modified forms of immunoglobulins, such as intrabodies, chimeric antibodies, fully human antibodies, humanized antibodies, antibody fragments, scFv, and heteroconjugate antibodies (for example, bispecific antibodies, diabodies, triabodies, tetrabodies, and nanobodies, etc.). The term “antibody” includes minibodies and diabodies. The term “antibody” includes a polypeptide of the immunoglobulin family or a polypeptide comprising fragments of an immunoglobulin that is capable of noncovalently, reversibly, and in a specific manner binding a corresponding antigen. An exemplary antibody structural unit comprises a tetramer. In some embodiments, a full length antibody can be composed of two identical pairs of polypeptide chains, each pair having one “light” and one “heavy” chain (connected through a disulfide bond). The recognized immunoglobulin genes include the kappa, lambda, alpha, gamma, delta, epsilon, hinge, and mu constant region genes, as well as the myriad immunoglobulin variable region genes. For full length chains, the light chains are classified as either kappa or lambda. For full length chains, the heavy chains are classified as gamma, mu, alpha, delta, or epsilon, which in turn define the immunoglobulin classes, IgG, IgM, IgA, IgD, and IgE, respectively. The N-terminus of each chain defines a variable region of about 100 to 110 or more amino acids primarily responsible for antigen recognition. The terms variable light chain (V_{L}) and variable heavy chain (V_{H}) refer to these regions of light and heavy chains respectively. As used in this application, an “antibody” encompasses all variations of antibody and fragments thereof. Thus, within the scope of this concept are full length antibodies, chimeric antibodies, humanized antibodies, single chain antibodies (scFv), Fab, Fab′, and multimeric versions of these fragments (for example, F(ab′)₂) with the same binding specificity. In some embodiments, the antibody binds specifically to a desired target.

[0500] The term “complementarity-determining domains” or “complementarity-determining regions (“CDRs”) interchangeably refer to the hypervariable regions of V_{L} and V_{H}. The CDRs are the target molecule-binding site of the antibody chains that harbors specificity for such target molecule. In some embodiments, there are three CDRs (CDR1-3, numbered sequentially from the N-terminus) in each V_{L} and/or V_{H}, constituting about 15-20% of the variable domains. The CDRs are structurally complementary to the epitope of the target molecule and are thus directly responsible for the binding specificity. The remaining stretches of the V_{L} or V_{H}, the so-called FRs, exhibit less variation in amino acid sequence (Kuby, Immunology, 4th ed., Chapter 4. W. H. Freeman & Co., New York, 2000).

[0501] The positions of the CDRs and framework regions can be determined using various well known definitions in the art. In some embodiments, the polypeptide is numbered from the beginning of the polypeptide signal sequence. In some embodiments, the polypeptide is numbered according from the beginning of the polypeptide and not including the signal sequence.

[0502] An “antibody variable light chain” or an “antibody variable heavy chain” as used herein have their plain and ordinary meaning as understood in light of the specification, and refers to a polypeptide comprising the V_{L} or V_{H}, respectively. The endogenous V_{L} is encoded by the gene segments V (variable) and J (junctional), and the endogenous V_{H} by V, D (diversity), and J. Each of V_{L} or V_{H} includes the CDRs as well as the framework regions. In this application, antibody variable light chains and/or antibody variable heavy chains may, from time to time, be collectively referred to as “antibody chains.” These terms encompass antibody chains containing mutations that do not disrupt the basic structure of V_{L} or V_{H}, as one skilled in the art will readily recognize. In some embodiments, full length heavy and/or light chains are contemplated. In some embodiments, only the variable region of the heavy and/or light chains are contemplated as being present.

[0503] Antibodies can exist as intact immunoglobulins or as a number of fragments produced by digestion with various peptidases as is known in the art. While various antibody fragments are defined in terms of the digestion of an intact antibody, one of skill will appreciate that such fragments may be synthesized de novo either chemically or by using recombinant DNA methodology. Thus, the term “antibody,” as used herein, has its plain and ordinary meaning as understood in light of the specification, and also includes antibody fragments either produced by the modification of whole antibodies, or those synthesized de novo using recombinant DNA methodologies (for example, single chain Fv) or those identified using phage display libraries (see, for example, McCafferty, J. et al., “Phage antibodies: filamentous phage displaying antibody variable domains,” Nature, Vol. 348, No. 66301, pp. 552-554, 1990). For preparation of monoclonal or polyclonal antibodies, any technique known in the art can be used. Techniques for the production of single chain antibodies (U.S. Pat. No. 4,946,778) can be adapted to produce antibodies to polypeptides of the present disclosure. Also, transgenic mice, or other organisms such as other mammals, may be used to express fully human monoclonal antibodies. Furthermore, E. Coli or yeast may be used to express and manufacture recombinant antibodies and antibody fragments. Alternatively, phage display and yeast display technologies can be used to identify high affinity binders to selected antigens. Alternatively, antibodies can be produced through B-cell screening technologies from human hosts (Pedrioli A., Oxenius A., Single B cell technologies for monoclonal antibody discovery, Trends in Immunology, (2021) volume 42, issue 12, p1143-1158). Furthermore, antibodies can be derived from immunization of camelid animals or screening of camelid phage libraries.

[0504] Methods for humanizing or primatizing non-human antibodies are well known in the art. Generally, a humanized antibody has one or more amino acid residues introduced into it from a source which is non-human. These non-human amino acid residues are often referred to as import residues, which are typically taken from an import variable domain. In some embodiments, the terms “donor” and “acceptor” sequences can be employed. Humanization can be essentially performed following the method of Winter and co-workers by substituting rodent CDRs or CDR sequences for the corresponding sequences of a human antibody. Accordingly, such humanized antibodies are chimeric antibodies (U.S. Pat. No. 4,816,567), wherein substantially less than an intact human variable domain has been substituted by the corresponding sequence from a non-human species. In practice, humanized antibodies are typically human antibodies in which some complementarity determining region (“CDR”) residues and possibly some framework (“FR”) residues are substituted by residues from analogous sites in rodent antibodies.

[0505] The term “antibody fragment” includes but is not limited to one or more antigen binding fragments of antibodies alone or in combination with other molecules, including, but not limited to Fab′, F(ab′)₂, Fab, Fv, rIgG (reduced IgG), scFv fragments, single domain fragments (nanobodies), peptibodies, nanobodies), minibodies, and diabodies. The term “scFv” refers to a single chain Fv (“fragment variable”) antibody in which the variable domains of the heavy chain and of the light chain of a traditional two chain antibody have been joined to form one chain.

[0506] A “diabody” comprises a first polypeptide chain which comprises a heavy (V_{H}) chain variable domain connected to a light chain variable domain (V_{L}) on the first polypeptide chain (V_{H}-V_{L}) connected by a peptide linker that is too short to allow pairing between the two domains on the first polypeptide chain and a second polypeptide chain comprising a light chain variable domain (V_{L}) linked to a heavy chain variable domain V_{H} on the second polypeptide chain (V_{L}-V_{H}) connected by a peptide linker that is too short to allow pairing between the two domains on the second polypeptide chain. The short linkages force chain pairing between the complementary domains of the first and the second polypeptide chains and promotes the assembly of a dimeric molecule with two functional antigen binding sites. Therefore, a peptide linker may be any suitable length that promotes such assembly, for example, between 5 and 20 amino acids in length. A “cys-diabody” is a diabody with one or more than one N-terminal cysteines.

[0507] In some embodiments, the targeting moiety includes all varieties of antibodies, including binding fragments thereof. Further included are constructs that include 1, 2, 3, 4, 5, and/or 6 CDRs. In some embodiments, these CDRs can be distributed between their appropriate framework regions in a traditional antibody. In some embodiments, the CDRs can be contained within a heavy and/or light chain variable region. In some embodiments, the CDRs can be within a heavy chain and/or a light chain. In some embodiments, the CDRs can be within a single peptide chain.

[0508] The terms “specific” “specifically” “selective” “selectively” and the like when used in the context of describing the interaction between a target protein and a targeting moiety, refers to a binding reaction that is determinative of the presence of the target protein in a heterogeneous population of proteins and other biologics, for example, in a biological sample, for example, a blood, serum, plasma or tissue sample. Thus, under designated immunoassay conditions, in some embodiments, the targeting moieties (e.g., protein binding partners, antibodies) with a particular binding specificity bind to a particular target protein at least two times the background and do not substantially bind in a significant amount to other non-target molecules present in the sample. Specific binding to a targeting moiety under such conditions may require the targeting moiety to have been selected for its specificity for a particular target protein. A variety of assay formats may be used to select targeting moieties specifically reactive with a particular target protein. For example, solid-phase ELISA immunoassays are routinely used to select antibodies specifically immunoreactive with a protein (see, for example, Harlow, E. & Lane D., “Using Antibodies, A Laboratory Manual,” Cold Spring Harbor Laboratory Press, 1998, for a description of immunoassay formats and conditions that can be used to determine specific immunoreactivity). Typically, a specific or selective binding reaction will produce a signal at least twice over the background signal and more typically at least than 10 to 100 times over the background.

[0509] The term “equilibrium dissociation constant (K_{D}, M)” refers to the dissociation rate constant (k_{d}, time⁻¹) divided by the association rate constant (kₐ, time⁻¹ M⁻¹). Equilibrium dissociation constants can be measured using any known method in the art. In some embodiments, the targeting moieties and/or bifunctional polypeptide of the present disclosure generally will have an equilibrium dissociation constant of less (that is superior binding) than about 10⁻⁷ or 10⁻⁸ M, for example, less than about 10⁻⁹ M or 10⁻¹⁰ M, in some embodiments, less than about 10⁻¹¹ M, 10⁻¹² M, or 10⁻¹³ M.

[0510] The term “conservative” modification, substitution, or variant applies to both amino acid and nucleic acid sequences. With respect to particular nucleic acid sequences, conservatively modified variants refers to those nucleic acids which encode identical or essentially identical amino acid sequences, or where the nucleic acid does not encode an amino acid sequence, to essentially identical sequences. Because of the degeneracy of the genetic code, a large number of functionally identical nucleic acids encode any given protein. For instance, the codons GCA, GCC, GCG and GCU all encode the amino acid alanine. Thus, at every position where an alanine is specified by a codon, the codon can be altered to any of the corresponding codons described without altering the encoded polypeptide. Such nucleic acid variations are “silent variations,” which are one species of conservatively modified variations. Every nucleic acid sequence herein which encodes a polypeptide also describes every possible silent variation of the nucleic acid. One of skill will recognize that each codon in a nucleic acid (except AUG, which is ordinarily the only codon for methionine, and TGG, which is ordinarily the only codon for tryptophan) can be modified to yield a functionally identical molecule. Accordingly, each silent variation of a nucleic acid that encodes a polypeptide is implicit in each described sequence. As to amino acid sequences, one of skill will recognize that individual substitutions, deletions or additions to a nucleic acid, peptide, polypeptide, or protein sequence which alters, adds or deletes a single amino acid or a small percentage of amino acids in the encoded sequence is a “conservative” modification, substitution or variant where the alteration results in the substitution of an amino acid with a chemically similar amino acid. Conservative substitution tables providing functionally similar amino acids are well known in the art. Such conservatively modified variants are in addition to and do not exclude polymorphic variants, interspecies homologs, and alleles of the present disclosure.

[0511] The following eight groups each contain amino acids that are conservative substitutions for one another. 1) Alanine (A), Glycine (G); 2) Aspartic acid (D), Glutamic acid (E); 3) Asparagine (N), Glutamine (Q); 4) Arginine (R), Lysine (K); 5) Isoleucine (I), Leucine (L), Methionine (M), Valine (V); 6) Phenylalanine (F), Tyrosine (Y), Tryptophan (W); 7) Serine(S), Threonine (T); and 8) Cysteine (C), Methionine (M) (see, for example, Creighton, T. E., “Proteins-Structures and Molecular Properties,” W. H. Freeman & Co. Ltd., 1984).

[0512] The term “% w/w” or “% wt/wt” as used herein has its plain and ordinary meaning as understood in light of the specification and refers to a percentage expressed in terms of the weight of the ingredient or agent over the total weight of the composition multiplied by 100. The term “% v/v” or “% vol/vol” as used herein has its plain and ordinary meaning as understood in the light of the specification and refers to a percentage expressed in terms of the liquid volume of the compound, substance, ingredient, or agent over the total liquid volume of the composition multiplied by 100.

### EXAMPLES

[0513] Some aspects of the embodiments discussed above are disclosed in further detail in the following examples, which are not in any way intended to limit the scope of the present disclosure. Those in the art will appreciate that many other embodiments also fall within the scope of the invention, as it is described herein above and in the claims.

### Example 1: HiBiT™ Assay for Proteasomal-Mediated Degradation of Target Protein

[0514] To obtain a preliminary assessment of the effectiveness of bifunctional polypeptide degraders, cells expressing HiBiT™-tagged target proteins were transfected with expression plasmids for the corresponding bifunctional polypeptide degrader. For HTT target, the exon 1 fragment mHTT (73Q repeats) was used. The following table summarizes the conditions for the several assay conditions utilized.

TABLE 27
Assay Conditions

| Assay # | Target | Cell line | Target Expression | SEQ ID NO |
|---|---|---|---|---|
| 1 | CTNNB1 | HepG2 | Exogenous plasmid | 2267-2425 |
| 2 | MYC | HepG2 | Exogenous plasmid | 2875-2999 |
| 3 | MYC | HepG2 | Exogenous plasmid | 2795-2858 |
| | | | | 2862-2866 |
| 4 | PCNA | HepG2 | Exogenous plasmid | All |
| 5 | mHTT | HEK293T | Stable cell line | All |
| 6 | FOXP3 | HEK293T | Stable cell line | All |
| 7 | MYC | HEK293T | Stable cell line | 2747-2794 |
| 8 | CTNNB1 | HCT116 | Stable cell line | 2186-2260 |

### Assays Using an Exogenous Plasmid Containing HiBiT™-Tagged Target

[0515] HepG2 cells were transfected with plasmids for expressing HiBiT™-tagged target proteins and plasmids for expressing the corresponding bifunctional polypeptide degrader at the time of plating. HiBiT™ signal was measured the next day using Nano-Glo HiBiT™ lytic detection system according to manufacturer's protocol (Assay #3 and #4). For cells with doxycycline-inducible system for expression of the bifunctional polypeptide degrader (Assay #1 and #2), doxycycline was added 24 hours post-transfection and HiBiT™ signal was measured the following day.

### Assay Using HiBiT™-Tagged Target Stable Expression Cell Line

[0516] HEK2393T or HCT116 cells stably expressing HiBiT™-tagged targets were transfected with plasmids for expressing the corresponding bifunctional polypeptide degrader 24 hours post-plating (Assay #7 and #8) or at the time of plating (Assay #5 and #6). Luminescence HiBiT™ signal was measured either 24 (Assay #7) or 48 hrs (Assay #8) post-transfection using Nano-Glo HiBiT™ lytic detection system according to the manufacturer's protocol (Promega N03040). For cells with doxycycline-inducible system (Assay #5 and #6), doxycycline was added 24 hours post-transfection and HiBiT™ signal was measured the following day.

[0517] The results of the HiBiT™ assays are summarized in Tables 7-9, 11-15, 17-18, 20-21, 23-25 above. Average values of the percentage of target protein remaining relative to control was determined. A grade for the percent of degradation is provided based on the following cutoffs: A>50% degradation (<50% remaining); B≥20%-≤50% degradation≥50%-≤80% remaining); C≥2%-<20% degradation (>80%-≤98 remaining); and D<2% degradation (>98% remaining) relative to control.

### Example 2: Western Blot Assay for Proteasomal-Mediated Degradation of Target Protein

[0518] To validate the HiBiT™ data described in Example 1 for select bifunctional polypeptide degraders, cells were seeded in 6 well plates and transfected with corresponding plasmids at the time of plating according to the assay conditions described above for Example 1, and cells were harvested the following day by scraping or trypsinization. For cells with doxycycline-inducible systems, doxycycline was added 24 hours post-transfection, and cells were harvested the following day by scraping or trypsinization. Pelleted cells were lysed in RIPA buffer supplemented with protease and proteasome inhibitors for 30 minutes on ice and lysates were cleared by centrifugation. Protein levels were measured by BCA assay and equal amounts of lysates were loaded to 4-15% pre-cast gel. Gels were transferred to nitrocellulose membrane using a semi-dry method and incubated overnight in primary antibodies. Following secondary antibody incubation, membranes were developed using the LiCor imaging system.

[0519] Western blot analysis validated the results of the HiBiT™ data for the select bifunctional polypeptide degraders tested, demonstrating degradation of the target proteins by the bifunctional polypeptide degraders.

### Example 3: Subcellular Localization of Bifunctional Polypeptide Degraders

[0520] Cells were seeded and transfected as described in Example 1. 48 hours post-plating, cells were fixed in 4% paraformaldehyde solution for 10 minutes, rinsed once in PBS pH 7.4, and permeabilized in 0.1% triton x-100 for 15 minutes at room temperature. To stain for bifunctional polypeptide degraders, cells were incubated overnight with HA antibody in PBS containing 1% BSA and 0.1% triton x-100 to label the HA tag of the bifunctional polypeptide degraders. The next day, cells were rinsed thrice with PBS and stained with fluorophore-tagged secondary antibody. Nucleus was counterstained with Hoescht33342. Cells were imaged on an inverted microscope with an LED fluorescence source (Olympus CKX-53).

[0521] Several NLS sequences were tested in various configurations. The following table provides a description of the NLS sequences tested.

TABLE 29
Exemplary NLS sequences used in Example 3

| | Parental | Uniprot ID of | SEQ |
|---|---|---|---|
| Name | Protein | Parental Protein | ID NO |
| spNLS.2 | SPOP | O43791 | 1896 |
| spNLS | SPOP | O43791 | 1897 |
| hrpNLS | Hrp1 | Q99383 | 1898 |
| bpNLS | 53BP1 | Q12888 | 1899 |
| nlpNLS | Nucleoplasmin | P05221 | 1900 |
| 3x(svNLS) | SV40 | P03070 | 1901 |
| 3x(mycNLS) | MYC | P01106 | 1902 |
| svNLS | SV40 | P03070 | 1903 |
| mycNLS | MYC | P01106 | 1904 |

[0522] The results are summarized in the following Table, where “Nuc” is predominantly nucleus, “Cyt” is predominantly cytoplasm, and “Mix” is both nucleus and cytoplasm. HA is the hemagglutinin epitope tag. The URDs and linkers are described elsewhere herein

TABLE 30
Subcellular localization of exemplary polypeptides

| URD | SEQ | | |
|---|---|---|---|
| Class | ID NO | Description | Location |
| SPOP | 3236 | HA-con1.1-SPOP.2 | Nuc |
| | 3108 | HA-con1.1-SPOP.3 | Cyt |
| | 3109 | HA-con1.1-SPOP.3-mycNLS | Nuc |
| | 3110 | HA-con1.1-SPOP.3-3xmyeNLS | Nuc |
| | 3111 | HA-con1.1-SPOP.3-svNLS | Nuc |
| | 3112 | HA-con1.1-SPOP.3-3xsvNLS | Nuc |
| | 3113 | HA-con1.1~SPOP.3-nlpNLS | Nuc |
| | 3114 | HA-con1.1-SPOP.3-bpNLS | Nuc |
| | 3115 | HA-con1.1-SPOP.3-hrpNLS | Nuc |
| NHLRC1 | 2401 | HA-mycNLS-TCF4.2-(GS)₆-NHLRC1.1 | Nuc |
| | 2417 | HA-TCF4.2-(GS)₆-NHLRC1.1 | Mix |
| | 2426 | HA-TCF4.2-(GS)₆-NHLRC1.1-spNLS | Nuc |
| | 2925 | HA-nlpNLS-mycV.1500-d-NHLRC1.1 | Nuc |
| | 2882 | HA-mycNLS-mycV.1500-GGGS-NHLRC1.1 | Mix |
| RNF125 | 2836 | HA-3xsvNLS-RNF125.2-(GGGS)₂-mycV.1500 | Mix |
| | 2837 | HA-nlpNLS-RNF125.2-(GGGS)₁-mycV.1500 | Nuc |
| | 2875 | HA-mycNLS-RNF125.2-GGGS-mycV.1500 | Nuc |
| | 2877 | HA-nlpNLS-RNF125.2-GGGS-mycV.1500 | Mix |
| | 2879 | HA-brpNLS-RNF125.2-GGGS-mycV.1500 | Mix |
| | 2947 | HA-spNLS.2-RNF125.2-(GGGS)₁-mycV.1500 | Mix |
| | 2948 | HA-RNF125.2-(GGGS)₁-mycV.1500-mycNLS | Mix |
| | 2949 | HA-RNF125.2-(GGGS)₁-mycV.1500-nlpNLS | Mix |
| | 2950 | HA-RNF125.2-(GGGS)₁-mycV.1500-hrpNLS | Nuc |
| | 2951 | HA-RNF125.2-(GGGS)₁-mycV.1500-spNLS.2 | Mix |
| RNF4 | 2902 | HA-nlpNLS-mycV.1500-GGGS-RNF4.1 | Nuc |
| | 2923 | HA-nlpNLS-mycV.1500-d-RNF4.1 | Nuc |
| | 2937 | HA-spNLS.2-mycV.1500-GGGS1-RNF4.1 | Nuc |
| RNF12.2 | 2924 | HA-nlpNLS-mycV.1500-d-RNF12.2 | Nuc |
| | 2920 | HA-nlpNLS-mycV.1500-GGGS-RNF12.2 | Nuc |
| | 2957 | HA-mycNLS-mycV.1500-GGGS-ZNRF1.1 | Nuc |
| | 2959 | HA-nlpNLS-mycV.1500-GGGS-ZNRF1.1 | Nuc |
| CHIP | 2574 | VL12.3-(GS)₃-CHIP.1-mycNLS-HA | Nuc |
| FBXW7a | 2544 | HA-FBXW7a.1-(GS)₃-VL12.3 | Nuc |
| SPOP | 2562 | VL12.3-(GS)₃-SPOP.1-mycNLS-HA | Nuc |
| VIF | 2568 | VL12.3-(GS)₃-VIF.1-mycNLS-HA | Mix |
| FBXW7b | 2592 | HA-FBXW7b.1-(GS)₃-VL12.3 | Cyt |
| ctrl | 56 | HA-mycNLS-VL12.3 | Mix |
| ctrl | 57 | HA-VL12.3 | Mix |

[0523] The SPOP URD is derived from an E3 ubiquitin ligase. SPOP.2 and SPOP.3 variant URDs are truncated regions of the full-length SPOP URD. Compared to SPOP.2, SPOP.3 has a truncation of 14 residues at the C-terminus. The additional 14 C-terminal residues of SPOP.2 function as an endogenous nuclear localization signal (NLS). As summarized in Table 30 above, subcellular localization was observed for bifunctional polypeptides with a con1 targeting moiety and either a SPOP.2 URD (HA-con1.1-SPOP.2, SEQ ID NO: 3236) or SPOP.3 URD (HA-con1.1-SPOP.3, SEQ ID NO: 3237). Truncation of the 14 residues changes the subcellular localization of SPOP from the nucleus (SPOP.2) to the cytoplasm (SPOP.3). Microscopy data confirms that the SPOP.2 bifunctional polypeptide is localized in the nucleus whereas the SPOP.3 bifunctional polypeptide is localized in the cytoplasm (FIG. 3). This demonstrates the ability to direct polypeptides to subcellular compartments by modifying/deleting endogenous localization sequences.

[0524] NHLRC1 is a RING E3 ubiquitin ligase with a bioinformatically-predicted nuclear localization and export signal (NLS and NES, Table 4). Bifunctional polypeptides with a TCF4 variant targeting moiety showed expression throughout the cells that is not exclusive to the nucleus (SEQ ID NO: 2417). Incorporation of mycNLS or spNLS.2 in the sequence of the bifunctional polypeptides (SEQ ID NO: 2401 and 2426, respectively) resulted in nuclear localization (FIG. 4). This demonstrates the ability to alter localization of polypeptides to subcellular compartments of interest by incorporating a localization sequence specific to such subcellular compartment of interest.

[0525] VL12.3 targeting moiety (SEQ ID NO: 57) showed localization throughout the cells when expressed as a standalone intrabody (FIG. 5). Bifunctional polypeptides comprising VL12 3 targeting moiety and URDs derived from either FBXW7a or FBW7b, E3 ligases with known nuclear and cytoplasmic localization (Yeh et al. “FBXW7: a critical tumor suppressor of human cancers,” Molecular Cancer (2018) 17:115), respectively directed the bifunctional polypeptide exclusively the nucleus (SEQ ID NO: 2544) or to the cytoplasm (SEQ ID NO: 2592). This highlights the ability to design bifunctional polypeptides to desired subcellular localization through URD selection.

### Example 4. Bifunctional Polypeptides that Direct Proteasomal-Mediated Degradation for Treatment of Cancer

[0526] A patient is selected who bas a cancer. The cancer may be a brain cancer, breast cancer, colorectal cancer, kidney cancer, liver cancer, lung cancer, pancreatic cancer, bladder cancer, stomach cancer, or a hematological malignancy, or another cancer not listed here. The cancer may be non-responsive to standard of care treatments. The cancer may be primary and/or metastatic.

[0527] Any of the bifunctional polypeptides, polynucleotides that encode for the bifunctional polypeptides, or a pharmaceutical composition that comprises the bifunctional polypeptide or polynucleotide and is specific for a protein target associated with cancer (e.g., MYC, FOXP3, or CTNNB1) is administered to the patient. The bifunctional polypeptide, polynucleotide, or pharmaceutical composition is administered enterally, parenterally, intravenously, intramuscularly, intra-arterially, intradermally, subcutaneously, intraperitoneally, intraventricularly, intrathecally, or intracranially. In some embodiments, the bifunctional polypeptide, polynucleotide, or pharmaceutical composition is administered as at least one dose at an amount of 1, 10, 100, 1000 ng, or 1, 10, 50, 100, 200, 300, 400, 500, 600, 700, 800, 900, 1000 μg, or 1, 10, 100, 200, 300, 400, 500, 600, 700, 800, 900, 1000 mg, or any amount within a range defined by any two of the aforementioned amounts, or any other amount appropriate for optimal efficacy in humans. In some embodiments, the bifunctional polypeptide, polynucleotide, or pharmaceutical composition is administered in a number of doses sufficient to achieve an improvement in the disease pathology in the patient. In some embodiments, the bifunctional polypeptide, polynucleotide, or pharmaceutical composition is administered in 1, 2, 3, 4, 5, 6, 7, 8, 9, 10, 20, 30, 40, 50, 60, 70, 80, 90, 100, 110, 120, 130, 140, or 150 doses, or any number of doses within a range defined by any two of the aforementioned number of doses, for example, 1-150 doses, 1-10 doses, 1-50 doses, 50-100 doses, or 50-150 doses. In some embodiments, the bifunctional polypeptide, polynucleotide, or pharmaceutical composition is administered in a single dose (for example, when using a gene therapy or neoadjuvant therapy approach). In the case of multiple doses, the doses can be administered every 1, 2, 3, 4, 5, 6, 7, 8, 9, 10, 11, 12, 24, 36, or 48 days or weeks or any time within a range defined by any two of the aforementioned times, for example, 1 day to 48 weeks, 1-48 days, 1-48 weeks, or 10-30 days.

[0528] After administration of the bifunctional polypeptide, polynucleotide, or pharmaceutical composition, the patient exhibits a prolongment of progression-free survival (PFS), a prolongment of overall survival (OS), a reduction in cancer burden (e.g., tumor size and number), or an amelioration of symptoms such as symptoms of pain, discomfort, or inflammation.

[0529] In some embodiments, the bifunctional polypeptide, polynucleotide, or pharmaceutical composition is administered as a supplement to a standard of care therapy for a cancer. In some embodiments, the standard of care treatment may include but is not limited to surgery, radiation, chemotherapy, targeted therapy, or immunotherapy. For example, the bifunctional polypeptide, polynucleotide, or pharmaceutical composition may be administered in combination with anti-PD-1, anti-PD-L1, anti-CTLA4, anti-LAG3, or adoptive cell therapy. In some embodiments, the combination of the standard of care therapy and the bifunctional polypeptide, polynucleotide, or pharmaceutical composition has a greater positive effect in reducing cancer burden or ameliorating symptoms compared to the standard of care therapy alone.

### Example 5. Bifunctional Polypeptides that Direct Proteasomal-Mediated Degradation for Treatment of Huntington's Disease

[0530] A patient is selected who has Huntington's disease.

[0531] Any of the bifunctional polypeptides, polynucleotides that encode for the bifunctional polypeptides, or a pharmaceutical composition that comprises the bifunctional polypeptide or polynucleotide and is specific for a protein target associated with Huntington's disease (e.g., HTT) is administered to the patient. The bifunctional polypeptide, polynucleotide, or pharmaceutical composition is administered enterally, parenterally, intravenously, intramuscularly, intra-arterially, intradermally, subcutaneously, intraperitoneally, intraventricularly, intrathecally, intraparenchymally, intracisternamagnally, or intracranially. In some embodiments, the bifunctional polypeptide, polynucleotide, or pharmaceutical composition is administered as at least one dose at an amount of 1, 10, 100, 1000 ng, or 1, 10, 50, 100, 200, 300, 400, 500, 600, 700, 800, 900, 1000 μg, or 1, 10, 100, 200, 300, 400, 500, 600, 700, 800, 900, 1000 mg, or any amount within a range defined by any two of the aforementioned amounts, or any other amount appropriate for optimal efficacy in humans. In some embodiments, the bifunctional polypeptide, polynucleotide, or pharmaceutical composition is administered in a number of doses sufficient to achieve an improvement in the disease pathology in the patient. In some embodiments, the bifunctional polypeptide, polynucleotide, or pharmaceutical composition is administered in 1, 2, 3, 4, 5, 6, 7, 8, 9, 10, 20, 30, 40, 50, 60, 70, 80, 90, 100, 110, 120, 130, 140, or 150 doses, or any number of doses within a range defined by any two of the aforementioned number of doses, for example, 1-150 doses, 1-10 doses, 1-50 doses, 50-100 doses, or 50-150 doses. In some embodiments, the bifunctional polypeptide, polynucleotide, or pharmaceutical composition is administered in a single dose (for example, when using a gene therapy or neoadjuvant therapy approach) In the case of multiple doses, the doses are administered every 1, 2, 3, 4, 5, 6, 7, 8, 9, 10, 11, 12, 24, 36, or 48 days or weeks or any time within a range defined by any two of the aforementioned times, for example, 1 day to 48 weeks, 1-48 days, 1-48 weeks, or 10-30 days. In some embodiments, when the bifunctional polypeptide, polynucleotide, or pharmaceutical composition is administered by a viral vector (e.g., an adenovirus, adeno-associated virus, lentivirus, or retrovirus vector), the viral vector is administered at a dose that is appropriate to induce the desired gene correction effect. For example, when administered intravenously, the viral vector is administered at, or up to, 10¹⁰, 10¹¹, 10¹², 10¹³, 10¹⁴, 10¹⁵, or 10¹⁶ viral genomes per dose administered to the patient. In other cases, when administered locally (e.g., intratumorally, intracranially, or the like), the viral vector is administered at, or up to, 10¹⁰, 10¹¹, 10¹², 10¹³, or 10¹⁴ viral genomes per dose administered to the patient.

[0532] After administration of the bifunctional polypeptide, polynucleotide, or pharmaceutical composition, the patient experiences an amelioration of symptoms associated with Huntington's disease, such as issues with motor function and cognitive capacity.

[0533] In some embodiments, the bifunctional polypeptide, polynucleotide, or pharmaceutical composition is administered as a supplement to a standard of care therapy or additional investigational therapy for Huntington's disease. For example, the bifunctional polypeptide, polynucleotide, or pharmaceutical composition may be administered in combination with tetrabenazine, deutetrabenazine, amantadine, valproic acid, selective serotonin reuptake inhibitors, or RNA interference therapies (e.g., antisense oligonucleotide, siRNA, shRNA, or miRNA) directed to reduction of HTT expression. In some embodiments, the combination of the standard of care therapy and the bifunctional polypeptide, polynucleotide, or pharmaceutical composition has a greater positive effect in ameliorating symptoms of Huntington's disease in the patient compared to the standard of care therapy alone.

[0534] In at least some of the previously described embodiments, one or more elements used in an embodiment can interchangeably be used in another embodiment unless such a replacement is not technically feasible. It will be appreciated by those skilled in the art that various other omissions, additions and modifications may be made to the methods and structures described above without departing from the scope of the claimed subject matter. All such modifications and changes are intended to fall within the scope of the subject matter, as defined by the appended claims.

[0535] With respect to the use of substantially any plural and/or singular terms herein, those having skill in the art can translate from the plural to the singular and/or from the singular to the plural as is appropriate to the context and/or application. The various singular/plural permutations may be expressly set forth herein for sake of clarity.

[0536] It will be understood by those within the art that, in general, terms used herein, and especially in the appended claims (e.g., bodies of the appended claims) are generally intended as “open” terms (e.g., the term “including” should be interpreted as “including but not limited to,” the term “having” should be interpreted as “having at least,” the term “includes” should be interpreted as “includes but is not limited to,” etc.). It will be further understood by those within the art that if a specific number of an introduced claim recitation is intended, such an intent will be explicitly recited in the claim, and in the absence of such recitation no such intent is present. For example, as an aid to understanding, the following appended claims may contain usage of the introductory phrases “at least one” and “one or more” to introduce claim recitations. However, the use of such phrases should not be construed to imply that the introduction of a claim recitation by the indefinite articles “a” or “an” limits any particular claim containing such introduced claim recitation to embodiments containing only one such recitation, even when the same claim includes the introductory phrases “one or more” or “at least one” and indefinite articles such as “a” or “an” (e.g., “a” and/or “an” should be interpreted to mean “at least one” or “one or more”); the same holds true for the use of definite articles used to introduce claim recitations. In addition, even if a specific number of an introduced claim recitation is explicitly recited, those skilled in the art will recognize that such recitation should be interpreted to mean at least the recited number (e.g., the bare recitation of “two recitations,” without other modifiers, means at least two recitations, or two or more recitations). Furthermore, in those instances where a convention analogous to “at least one of A, B, and C, etc.” is used, in general such a construction is intended in the sense one having skill in the art would understand the convention (e.g., “a system having at least one of A, B, and C” would include but not be limited to systems that have A alone, B alone, C alone, A and B together, A and C together, B and C together, and/or A, B, and C together, etc.). In those instances where a convention analogous to “at least one of A, B, or C, etc.” is used, in general such a construction is intended in the sense one having skill in the art would understand the convention (e.g., “a system having at least one of A, B, or C” would include but not be limited to systems that have A alone, B alone, C alone, A and B together, A and C together, B and C together, and/or A, B, and C together, etc.). It will be further understood by those within the art that virtually any disjunctive word and/or phrase presenting two or more alternative terms, whether in the description, claims, or drawings, should be understood to contemplate the possibilities of including one of the terms, either of the terms, or both terms. For example, the phrase “A or B” will be understood to include the possibilities of “A” or “B” or “A and B.”

[0537] In addition, where features or aspects of the disclosure are described in terms of Markush groups, those skilled in the art will recognize that the disclosure is also thereby described in terms of any individual member or subgroup of members of the Markush group.

[0538] As will be understood by one skilled in the art, for any and all purposes, such as in terms of providing a written description, all ranges disclosed herein also encompass any and all possible sub-ranges and combinations of sub-ranges thereof. Any listed range can be easily recognized as sufficiently describing and enabling the same range being broken down into at least equal halves, thirds, quarters, fifths, tenths, etc. As a non-limiting example, each range discussed herein can be readily broken down into a lower third, middle third and upper third, etc. As will also be understood by one skilled in the art all language such as “up to,” “at least,” “greater than,” “less than,” and the like include the number recited and refer to ranges which can be subsequently broken down into sub-ranges as discussed above. Finally, as will be understood by one skilled in the art, a range includes each individual member. Thus, for example, a group having 1-3 articles refers to groups having 1, 2, or 3 articles. Similarly, a group having 1-5 articles refers to groups having 1, 2, 3, 4, or 5 articles, and so forth.

[0539] While various aspects and embodiments have been disclosed herein, other aspects and embodiments will be apparent to those skilled in the art. The various aspects and embodiments disclosed herein are for purposes of illustration and are not intended to be limiting, with the true scope and spirit being indicated by the following claims.

[0540] All references cited herein, including but not limited to published and unpublished applications, patents, and literature references, are incorporated herein by reference in their entirety and are hereby made a part of this specification. To the extent publications and patents or patent applications incorporated by reference contradict the disclosure contained in the specification, the specification is intended to supersede and/or take precedence over any such contradictory material.

### REFERENCES

[0541] Amaro et al. An Intrabody Drug (rAAV6-INT41) Reduces the Binding of N-Terminal Huntingtin Fragment(s) to DNA to Basal Levels in PC12 Cells and Delays Cognitive Loss in the R6/2 Animal Model. J. Neurodegener. Dis. (2016) 7120753.
[0542] Baltz et al. Design and Functional Characterization of Synthetic E3 Ubiquitin Ligases for Targeted Protein Depletion. Curr. Protoc. Chem. Biol. (2018) 10 (1): 72-90.
[0543] Bandukwala et al. Structure of a domain-swapped FOXP3 dimer on DNA and its function in regulatory T cells. Immunity (2011) 34 (4): 479-91.
[0544] Chatterjee et al. Targeted intracellular degradation of SARS-COV-2 via computationally optimized peptide fusions. Commun Biol. (2020) 3 (1): 715.
[0545] Chen et al. The ubiquitin ligase Stubl negatively modulates regulatory T cell suppressive activity by promoting degradation of the transcription factor Foxp3. Immunity (2013) 39 (2): 272-85.
[0546] Choo & Zhang Detection of protein ubiquitination J Vis. Exp (2009) 30:1293
[0547] Colby et al. Potent inhibition of huntingtin aggregation and cytotoxicity by a disulfide bond-free single-domain intracellular antibody PNAS (2004) 101 (51): 17616-21.
[0548] Dixon et al. NanoLuc Complementation Reporter Optimized for Accurate Measurement of Protein Interactions in Cells. ACS Chem Biol. (2016) 11 (2): 400-8.
[0549] Franklin et al. A High-Throughput Assay for Monitoring Ubiquitination in Real Time. Front. Chem. (2019) 7:816.
[0550] Fujiwara et al. A single-chain antibody/epitope system for functional analysis of protein-protein interactions. Biochemistry (2002) 41 (42): 12729-38.
[0551] Graham et al. Tef4 can specifically recognize β-catenin using alternate conformations. Nat Struct Biol. (2001) 8 (12): 1048-52.
[0552] Hatakeyama et al. Targeted destruction of c-Myc by an engineered ubiquitin ligase suppresses cell transformation and tumor formation. Cancer Res. (2005) 65 (17): 7874-9.
[0553] Liao et al. A PROTAC peptide induces durable β-catenin degradation and suppresses Wnt-dependent intestinal cancer. Cell Discov. (2020) 6:35.
[0554] Lim et al. bioPROTACs as versatile modulators of intracellular therapeutic targets including proliferating cell nuclear antigen (PCNA). PNAS (2020) 117 (11): 5791-5800.
[0555] Lu et al. Discovery of a Keap1-dependent peptide PROTAC to knockdown Tau by ubiquitination-proteasome degradation pathway. Eur. J. Med. Chem. (2018) 146:251-259.
[0556] Ludwicki et al. Broad-Spectrum Proteome Editing with an Engineered Bacterial Ubiquitin Ligase Mimic. ACS Cent. Sci. (2019) 5 (5): 852-866.
[0557] Pan et al. A recombinant chimeric protein specifically induces mutant KRAS degradation and potently inhibits pancreatic tumor growth. Oncotarget (2016) 7 (28): 44299-44309.
[0558] Portnoff et al. Ubiquibodies, synthetic E3 ubiquitin ligases endowed with unnatural substrate specificity for targeted protein silencing. J. Biol. Chem. (2014) 289 (11): 7844-55.
[0559] Riching et al. Quantitative Live-Cell Kinetic Degradation and Mechanistic Profiling of PROTAC Mode of Action. ACS Chem Biol. (2018) 13 (9): 2758-2770.
[0560] Samarasinghe et al. OligoTRAFTACs: A Generalizable Method for Transcription Factor Degradation. bioRxiv (2021). doi: 10.1101/2021.12.20.473482.
[0561] Soucek et al. Design and properties of a Myc derivative that efficiently homodimerizes. Oncogene (1998) 17 (19): 2463-72.
[0562] Stanley et al. Structural Insight into the Human Immunodeficiency Virus Vif SOCS Box and Its Role in Human E3 Ubiquitin Ligase Assembly J Virol. (2008) 82 (17): 8656-8663.
[0563] Stephens et al. Engineering Single Pan-Specific Ubiquitibodies for Targeted Degradation of. All Forms of Endogenous ERK Protein Kinase. ACS Synth Biol. (2021) 10 (9): 2396-2408.
[0564] Traenkle et al. Monitoring interactions and dynamics of endogenous beta-catenin with intracellular nanobodies in living cells. Mol Cell Proteomics (2015) 14 (3): 7070-23.
[0565] Udeshi et al. Large-scale identification of ubiquitination sites by mass spectrometry. Nat Protoc. (2013) 8 (10): 1950-60.
[0566] Wang et al. The state of the art of PROTAC technologies for drug discovery. Eur J. Med. Chem. (2022) 235:114290
[0567] Welcker et al. The Fbw7 tumor suppressor regulates glycogen synthase kinase 3 phosphorylation-dependent c-Myc protein degradation. PNAS (2004) 101 (24): 9085-90.
[0568] Wu et al. The DDB1-DCAF1-Vpr-UNG2 crystal structure reveals how HIV-1 Vpr steers human UNG2 towards destruction. Nat Struct Mol. Biol. (2016) 23 (10): 933-940.
[0569] Yang et al. Circular mRNA encoded PROTAC (RiboPROTAC) as a new platform for the degradation of intracellular therapeutic targets. BioRxiv (2022). doi: 10.1101/2022.04.22.489232.
[0570] WO 2014/193632.

1-194. (canceled)

195. A polypeptide comprising or consisting of a portion of a protein selected from the group consisting of a RING family E3 ubiquitin ligase, a cullin family E3 ubiquitin ligase, a homologous to E6AP carboxyl terminus (HECT) family E3 ubiquitin ligase, and a viral homolog of an E3 ubiquitin ligase, wherein the portion is a ubiquitin-proteasome system recruiting domain (URD) that has ubiquitin-proteasome recruiting activity.

196. The polypeptide of claim 195, wherein the portion consists of an amino acid sequence selected from any one of SEQ ID NOs: 1858-1862, 1867-1875, 1877, 1886-1888, and 1893.

197. A bifunctional polypeptide comprising the polypeptide of claim 195, wherein the bifunctional polypeptide comprises:
a) the portion of the protein; and
b) a targeting moiety that is capable of binding to a target protein, optionally an intracellular target protein, wherein the target protein is selected from MYC, (optionally c-MYC), beta catenin 1 (CTNNB1), forkhead box P3 (FOXP3), proliferating cell nuclear antigen (PCNA), and huntingtin (HTT), or MYC, (optionally c-MYC), CTNNB1, FOXP3, and HTT.

198. The bifunctional polypeptide of claim 197, consisting of any one of SEQ ID NOs: 1858-1862, 1867-1875, 1877, 1886-1888, or 1893.

199. The bifunctional polypeptide of claim 197, wherein the targeting moiety comprises or consists of an amino acid sequence having at least 80%, 85%, 86%, 87%, 88%, 89%, 90%, 91%, 92%, 93%, 94%, 95%, 96%, 97%, 98%, 99%, or 100% sequence identity to any one of SEQ ID NOs: 6-12, 1918, 1926, 1934, 1942, 1950, 1958, 1966, 1974, 1982, 1990, 1998, 2006, 2014, 2022, 2030, 2038, 2046, 2054, 2062, 2070, 2078, 2086, 2087, 2095 and 2111-2137.

200. The bifunctional polypeptide of claim 197, wherein the bifunctional polypeptide comprises or consists of an amino acid sequence having at least 80%, 85%, 86%, 87%, 88%, 89%, 90%, 91%, 92%, 93%, 94%, 95%, 96%, 97%, 98%, 99%, or 100% sequence identity to any one of the SEQ ID NOs in Tables disclosing Grade A (Tables 7, 11, 17 and 23), Grade B (Tables 8, 12, 14, 18, 20, and 24), and/or Grades C and D (Tables 9, 13, 15, 21 and 25), optionally excluding any one of the SEQ ID NOs having a Grade of D, optionally wherein the sequence lacks the HA tag sequence (SEQ ID NO: 50).

201. The bifunctional polypeptide of claim 197, wherein the bifunctional polypeptide comprises or consists of an amino acid sequence having at least 80%, 85%, 86%, 87%, 88%, 89%, 90%, 91%, 92%, 93%, 94%, 95%, 96%, 97%, 98%, 99%, or 100% sequence identity to any one of SEQ ID NOs: 2747-2794, optionally wherein the sequence lacks the HA tag sequence (SEQ ID NO: 50).

202. The bifunctional polypeptide of claim 197, wherein the bifunctional polypeptide comprises or consists of an amino acid sequence of any one of the SEQ ID NOs in Table 11 and/or 12, optionally wherein the sequence lacks the HA tag sequence (SEQ ID NO: 50).

203. The bifunctional polypeptide of claim 197, wherein the bifunctional polypeptide comprises or consists of an amino acid sequence having at least 80%, 85%, 86%, 87%, 88%, 89%, 90%, 91%, 92%, 93%, 94%, 95%, 96%, 97%, 98%, 99%, or 100% sequence identity to any one of the SEQ ID NOs in Table 20 and/or 21, optionally excluding any one of the SEQ ID NOs having a Grade of D, optionally wherein the sequence lacks the HA tag sequence (SEQ ID NO: 50).

204. The polypeptide or bifunctional polypeptide of claim 197, wherein the polypeptide or bifunctional polypeptide comprises or consists of an amino acid sequence having at least 80%, 85%, 86%, 87%, 88%, 89%, 90%, 91%, 92%, 93%, 94%, 95%, 96%, 97%, 98%, 99%, or 100% sequence identity to:
i) any one of SEQ ID NOs: 2177-2328, 2331-3205 and 3238;
ii) any one of SEQ ID NOs: 2177-2328, 2331-3205 and 3238 wherein the sequence lacks the HA tag sequence (SEQ ID NO: 50); or
iii) the polypeptide encoded by the polynucleotide of any one of SEQ ID NOs: 3207-3235.

205. A polynucleotide encoding a bifunctional polypeptide comprising or consisting of the bifunctional polypeptide of claim 197.

206. A polynucleotide encoding a bifunctional polypeptide comprising or consisting of the bifunctional polypeptide of claim 202.

207. A polynucleotide encoding a bifunctional polypeptide comprising or consisting of the bifunctional polypeptide of claim 198.

208. A polypeptide comprising or consisting of an amino acid sequence having at least 80%, 85%, 86%, 87%, 88%, 89%, 90%, 91%, 92%, 93%, 94%, 95%, 96%, 97%, 98%, 99%, or 100% sequence identity to:
i) any one of SEQ ID NOs: 1836-1895;
ii) any one of SEQ ID NOs: 1896-1909;
iii) any one of SEQ ID NOs: 1918, 1926, 1934, 1942, 1950, 1958, 1966, 1974, 1982, 1990, 1998, 2006, 2014, 2022, 2030, 2038, 2046, 2054, 2062, 2070, 2078, 2086, 2087, 2095, and 2111-2137;
iv) any one of SEQ ID NOs: 2177-2328, 2331-3205 and 3238;
v) any one of SEQ ID NOs: 2177-2328, 2331-3205 and 3238 wherein the sequence lacks the HA tag sequence (SEQ ID NO: 50); or
vi) the polypeptide encoded by the polynucleotide of any one of SEQ ID NOs: 3207-3235.

209. A polynucleotide encoding for a polypeptide of claim 208.

210. The polynucleotide of claim 209, wherein the polynucleotide is a DNA or an RNA, optionally an mRNA or a circular RNA, optionally wherein the RNA, mRNA or circular RNA comprises one or more modified nucleosides, optionally wherein up to 100% of the nucleotides comprising uracil are replaced with pseudouridine and/or N1-methylpseudouridine.

211. The polynucleotide of claim 209, wherein the polynucleotide is packaged in a lipid nanoparticle, a polymeric nanoparticle, an extracellular vesicle, optionally an exosome, or a viral vector, optionally a replicating viral vector or a non-replicating viral vector, optionally an adenovirus, adeno-associated virus, lentivirus, or retrovirus vector.

212. A pharmaceutical composition comprising the polypeptide, bifunctional polypeptide of claim 197 or a polynucleotide encoding said bifunctional polypeptide and one or more pharmaceutically acceptable excipients, carriers, or diluents.

213. A method of treating a subject comprising administering the bifunctional polypeptide of claim 197 or a polynucleotide encoding said bifunctional polypeptide to a subject in need thereof, optionally wherein the subject has a cancer or a neurodegenerative disease, optionally Huntington's disease.

214. A method of reducing the amount of a target protein in a cell comprising contacting the cell with the bifunctional polypeptide of claim 197 or a polynucleotide encoding said bifunctional polypeptide.

The application's sequence listing, which the Patent Office published only in electronic form, follows.

SEQUENCE LISTING (3256 sequences)

SEQ ID NO: 1 - protein, 439 aa, Homo sapiens
  source 1..439: note = Human MYC
MPLNVSFTNRNYDLDYDSVQPYFYCDEEENFYQQQQQSELQPPAPSEDIWKKFELLPTPPLSPSRRSGLCSPSYVAVTPFSLRGDNDGGGGSFSTADQLEMVTELLGGDMVNQSFICDPDDETFIKNIIIQDCMWSGFSAAAKLVSEKLASYQAARKDSGSPNPARGHSVCSTSSLYLQDLSAAASECIDPSVVFPYPLNDSSSPKSCASQDSSAFSPSSDSLLSSTESSPQGSPEPLVLHEETPPTTSSDSEEEQEDEEEIDVVSVEKRQAPGKRSESGSPSAGGHSKPPHSPLVLKRCHVSTHQHNYAAPPSTRKDYPAAKRVKLDSVRVLRQISNNRKCTSPRSSDTEENVKRRTHNVLERQRRNELKRSFFALRDQIPELENNEKAPKVVILKKATAYILSVQAEEQKLISEEDLLRKRREQLKHKLEQLRNSCA

SEQ ID NO: 2 - protein, 3142 aa, Homo sapiens
  source 1..3142: note = Human HTT
MATLEKLMKAFESLKSFQQQQQQQQQQQQQQQQQQQQQPPPPPPPPPPPQLPQPPPQAQPLLPQPQPPPPPPPPPPGPAVAEEPLHRPKKELSATKKDRVNHCLTICENIVAQSVRNSPEFQKLLGIAMELFLLCSDDAESDVRMVADECLNKVIKALMDSNLPRLQLELYKEIKKNGAPRSLRAALWRFAELAHLVRPQKCRPYLVNLLPCLTRTSKRPEESVQETLAAAVPKIMASFGNFANDNEIKVLLKAFIANLKSSSPTIRRTAAGSAVSICQHSRRTQYFYSWLLNVLLGLLVPVEDEHSTLLILGVLLTLRYLVPLLQQQVKDTSLKGSFGVTRKEMEVSPSAEQLVQVYELTLHHTQHQDHNVVTGALELLQQLFRTPPPELLQTLTAVGGIGQLTAAKEESGGRSRSGSIVELIAGGGSSCSPVLSRKQKGKVLLGEEEALEDDSESRSDVSSSALTASVKDEISGELAASSGVSTPGSAGHDIITEQPRSQHTLQADSVDLASCDLTSSATDGDEEDILSHSSSQVSAVPSDPAMDLNDGTQASSPISDSSQTTTEGPDSAVTPSDSSEIVLDGTDNQYLGLQIGQPQDEDEEATGILPDEASEAFRNSSMALQQAHLLKNMSHCRQPSDSSVDKFVLRDEATEPGDQENKPCRIKGDIGQSTDDDSAPLVHCVRLLSASFLLTGGKNVLVPDRDVRVSVKALALSCVGAAVALHPESFFSKLYKVPLDTTEYPEEQYVSDILNYIDHGDPQVRGATAILCGTLICSILSRSRFHVGDWMGTIRTLTGNTFSLADCIPLLRKTLKDESSVTCKLACTAVRNCVMSLCSSSYSELGLQLIIDVLTLRNSSYWLVRTELLETLAEIDFRLVSFLEAKAENLHRGAHHYTGLLKLQERVLNNVVIHLLGDEDPRVRHVAAASLIRLVPKLFYKCDQGQADPVVAVARDQSSVYLKLLMHETQPPSHFSVSTITRIYRGYNLLPSITDVTMENNLSRVIAAVSHELITSTTRALTFGCCEALCLLSTAFPVCIWSLGWHCGVPPLSASDESRKSCTVGMATMILTLLSSAWFPLDLSAHQDALILAGNLLAASAPKSLRSSWASEEEANPAATKQEEVWPALGDRALVPMVEQLFSHLLKVINICAHVLDDVAPGPAIKAALPSLTNPPSLSPIRRKGKEKEPGEQASVPLSPKKGSEASAASRQSDTSGPVTTSKSSSLGSFYHLPSYLKLHDVLKATHANYKVTLDLQNSTEKFGGFLRSALDVLSQILELATLQDIGKCVEEILGYLKSCFSREPMMATVCVQQLLKTLFGTNLASQFDGLSSNPSKSQGRAQRLGSSSVRPGLYHYCFMAPYTHFTQALADASLRNMVQAEQENDTSGWFDVLQKVSTQLKTNLTSVTKNRADKNAIHNHIRLFEPLVIKALKQYTTTTCVQLQKQVLDLLAQLVQLRVNYCLLDSDQVFIGFVLKQFEYIEVGQFRESEAIIPNIFFFLVLLSYERYHSKQIIGIPKIIQLCDGIMASGRKAVTHAIPALQPIVHDLFVLRGTNKADAGKELETQKEVVVSMLLRLIQYHQVLEMFILVLQQCHKENEDKWKRLSRQIADIILPMLAKQQMHIDSHEALGVLNTLFEILAPSSLRPVDMLLRSMFVTPNTMASVSTVQLWISGILAILRVLISQSTEDIVLSRIQELSFSPYLISCTVINRLRDGDSTSTLEEHSEGKQIKNLPEETFSRFLLQLVGILLEDIVTKQLKVEMSEQQHTFYCQELGTLLMCLIHIFKSGMFRRITAAATRLFRSDGCGGSFYTLDSLNLRARSMITTHPALVLLWCQILLLVNHTDYRWWAEVQQTPKRHSLSSTKLLSPQMSGEEEDSDLAAKLGMCNREIVRRGALILFCDYVCQNLHDSEHLTWLIVNHIQDLISLSHEPPVQDFISAVHRNSAASGLFIQAIQSRCENLSTPTMLKKTLQCLEGIHLSQSGAVLTLYVDRLLCTPFRVLARMVDILACRRVEMLLAANLQSSMAQLPMEELNRIQEYLQSSGLAQRHQRLYSLLDRFRLSTMQDSLSPSPPVSSHPLDGDGHVSLETVSPDKDWYVHLVKSQCWTRSDSALLEGAELVNRIPAEDMNAFMMNSEFNLSLLAPCLSLGMSEISGGQKSALFEAAREVTLARVSGTVQQLPAVHHVFQPELPAEPAAYWSKLNDLFGDAALYQSLPTLARALAQYLVVVSKLPSHLHLPPEKEKDIVKFVVATLEALSWHLIHEQIPLSLDLQAGLDCCCLALQLPGLWSVVSSTEFVTHACSLIYCVHFILEAVAVQPGEQLLSPERRTNTPKAISEEEEEVDPNTQNPKYITAACEMVAEMVESLQSVLALGHKRNSGVPAFLTPLLRNIIISLARLPLVNSYTRVPPLVWKLGWSPKPGGDFGTAFPEIPVEFLQEKEVFKEFIYRINTLGWTSRTQFEETWATLLGVLVTQPLVMEQEESPPEEDTERTQINVLAVQAITSLVLSAMTVPVAGNPAVSCLEQQPRNKPLKALDTRFGRKLSIIRGIVEQEIQAMVSKRENIATHHLYQAWDPVPSLSPATTGALISHEKLLLQINPERELGSMSYKLGQVSIHSVWLGNSITPLREEEWDEEEEEEADAPAPSSPPTSPVNSRKHRAGVDIHSCSQFLLELYSRWILPSSSARRTPAILISEVVRSLLVVSDLFTERNQFELMYVTLTELRRVHPSEDEILAQYLVPATCKAAAVLGMDKAVAEPVSRLLESTLRSSHLPSRVGALHGVLYVLECDLLDDTAKQLIPVISDYLLSNLKGIAHCVNIHSQQHVLVMCATAFYLIENYPLDVGPEFSASIIQMCGVMLSGSEESTPSIIYHCALRGLERLLLSEQLSRLDAESLVKLSVDRVNVHSPHRAMAALGLMLTCMYTGKEKVSPGRTSDPNPAAPDSESVIVAMERVSVLFDRIRKGFPCEARVVARILPQFLDDFFPPQDIMNKVIGEFLSNQQPYPQFMATVVYKVFQTLHSTGQSSMVRDWVMLSLSNFTQRAPVAMATWSLSCFFVSASTSPWVAAILPHVISRMGKLEQVDVNLFCLVATDFYRHQIEEELDRRAFQSVLEVVAAPGSPYHRLLTCLRNVHKVTTC

SEQ ID NO: 3 - protein, 781 aa, Homo sapiens
  source 1..781: note = Human CTNNB1
MATQADLMELDMAMEPDRKAAVSHWQQQSYLDSGIHSGATTTAPSLSGKGNPEEEDVDTSQVLYEWEQGFSQSFTQEQVADIDGQYAMTRAQRVRAAMFPETLDEGMQIPSTQFDAAHPTNVQRLAEPSQMLKHAVVNLINYQDDAELATRAIPELTKLLNDEDQVVVNKAAVMVHQLSKKEASRHAIMRSPQMVSAIVRTMQNTNDVETARCTAGTLHNLSHHREGLLAIFKSGGIPALVKMLGSPVDSVLFYAITTLHNLLLHQEGAKMAVRLAGGLQKMVALLNKTNVKFLAITTDCLQILAYGNQESKLIILASGGPQALVNIMRTYTYEKLLWTTSRVLKVLSVCSSNKPAIVEAGGMQALGLHLTDPSQRLVQNCLWTLRNLSDAATKQEGMEGLLGTLVQLLGSDDINVVTCAAGILSNLTCNNYKNKMMVCQVGGIEALVRTVLRAGDREDITEPAICALRHLTSRHQEAEMAQNAVRLHYGLPVVVKLLHPPSHWPLIKATVGLIRNLALCPANHAPLREQGAIPRLVQLLVRAHQDTQRRTSMGGTQQQFVEGVRMEEIVEGCTGALHILARDVHNRIVIRGLNTIPLFVQLLYSPIENIQRVAAGVLCELAQDKEAAEAIEAEGATAPLTELLHSRNEGVATYAAAVLFRMSEDKPQDYKKRLSVELTSSLFRTEPMAWNETADLGLDIGAQGEPLGYRQDDPSYRSFHSGGYGQDALGMDPMMEHEMGGHHPGADYPVDGLPDLGHAQDLMDGLPPGDSNQLAWFDTDL

SEQ ID NO: 4 - protein, 254 aa, synthetic construct
  source 1..254: note = 3DX.1 peptide
EVKLVESGGDLVKPGGSLKLSCAASGFTFSHYGMSWVRQTPDKRLEWVATIGSRGTYTHYPDSVKGRFTISRDNDKNALYLQMNSLRTEDTAMYYCARKSEFYYYGNTYYYSAMDYWGQGASVTVSSGGGGSGGGDSGGGGSDIVLTQSPASLAVSLGQRATISCRASESVDNYGFSFMNWFQQKPGQPPKLLIYATSNRGSGVPARFSGSGSGTDFSLNIHPVEEDDSAMYFCQQTKEVPWTFGGGTKLEIKR

SEQ ID NO: 5 - protein, 254 aa, synthetic construct
  source 1..254: note = 3DX.2 peptide
DIVLTQSPASLAVSLGQRATISCRASESVDNYGFSFMNWFQQKPGQPPKLLIYATSNRGSGVPARFSGSGSGTDFSLNIHPVEEDDSAMYFCQQTKEVPWTFGGGTKLEIKRGGGGSGGGDSGGGGSEVKLVESGGDLVKPGGSLKLSCAASGFTFSHYGMSWVRQTPDKRLEWVATIGSRGTYTHYPDSVKGRFTISRDNDKNALYLQMNSLRTEDTAMYYCARKSEFYYYGNTYYYSAMDYWGQGASVTVSS

SEQ ID NO: 6 - protein, 92 aa, synthetic construct
  source 1..92: note = OMOMYC peptide
SDTEENVKRRTHNVLERQRRNELKRSFFALRDQIPELENNEKAPKVVILKKATAYILSVQAETQKLISEIDLLRKQNEQLKHKLEQLRNSCA

SEQ ID NO: 7 - protein, 87 aa, synthetic construct
  source 1..87: note = FOXP3DBD 337-423 peptide
RPPFTYATLIRWAILEAPEKQRTLNEIYHWFTRMFAFFRNHPATWKNAIRHNLSLHKCFVRVESEKGAVWTVDELEFRKKRSQRPSR

SEQ ID NO: 8 - protein, 431 aa, Homo sapiens
  source 1..431: note = Human FOXP3
MPNPRPGKPSAPSLALGPSPGASPSWRAAPKASDLLGARGPGGTFQGRDLRGGAHASSSSLNPMPPSQLQLPTLPLVMVAPSGARLGPLPHLQALLQDRPHFMHQLSTVDAHARTPVLQVHPLESPAMISLTPPTTATGVFSLKARPGLPPGINVASLEWVSREPALLCTFPNPSAPRKDSTLSAVPQSSYPLLANGVCKWPGCEKVFEEPEDFLKHCQADHLLDEKGRAQCLLQREMVQSLEQQLVLEKEKLSAMQAHLAGKMALTKASSVASSDKGSCCIVAAGSQGPVVPAWSGPREAPDSLFAVRRHLWGSHGNSTFPEFLHNMDYFKFHNMRPPFTYATLIRWAILEAPEKQRTLNEIYHWFTRMFAFFRNHPATWKNAIRHNLSLHKCFVRVESEKGAVWTVDELEFRKKRSQRPSRCSNPTPGP

SEQ ID NO: 9 - protein, 114 aa, synthetic construct
  source 1..114: note = VL12.3 peptide
GSQPVLTQSPSVSAAPRQRVTISVSGSNSNIGSNTVNWIQQLPGRAPELLMYDDDLLAPGVSDRFSGSRSGTSASLTISGLQSEDEADYYAATWDDSLNGWVFGGGTKVTVLSG

SEQ ID NO: 10 - protein, 251 aa, synthetic construct
  source 1..251: note = INT41 peptide
AEVQLVVSGGGLVKPGGSMILSCAASGFTFSNYSMNWVRQAPGKGLEWVSSISSSSEYIYYADFVKGRFTISRDNAKNSLYLQMDSLRAEDTAVYYCAWPGYRKAWGRGTLVTVSSGGGGSGGGGSGGGGSQSVLTQPASVSGSPGQSITISCAGTSSDVGGYNYVSWYQQHPGKAPKLMIYEDSKRPSGVSNRFSGSKSGNTASLTISGLRAEDEADYYCSYCASKGHWLFGGGTKLAVLGAAAEQKLIS

SEQ ID NO: 11 - protein, 45 aa, synthetic construct
  source 1..45: note = TCF4 10-54 peptide
DDLGANDELISFKDEGEQEEKSSENSSAERDLADVKSSLVNESET

SEQ ID NO: 12 - protein, 619 aa, Homo sapiens
  source 1..619: note = TCF4 peptide
MPQLNGGGGDDLGANDELISFKDEGEQEEKSSENSSAERDLADVKSSLVNESETNQNSSSDSEAERRPPPRSESFRDKSRESLEEAAKRQDGGLFKGPPYPGYPFIMIPDLTSPYLPNGSLSPTARTLHFQSGSTHYSAYKTIEHQIAVQYLQMKWPLLDVQAGSLQSRQALKDARSPSPAHIVSNKVPVVQHPHHVHPLTPLITYSNEHFTPGNPPPHLPADVDPKTGIPRPPHPPDISPYYPLSPGTVGQIPHPLGWLVPQQGQPVYPITTGGFRHPYPTALTVNASMSRFPPHMVPPHHTLHTTGIPHPAIVTPTVKQESSQSDVGSLHSSKHQDSKKEEEKKKPHIKKPLNAFMLYMKEMRAKVVAECTLKESAAINQILGRRWHALSREEQAKYYELARKERQLHMQLYPGWSARDNYGKKKKRKRDKQPGETNEHSECFLNPCLSLPPITDLSAPKKCRARFGLDQQNNWCGPCRRKKKCVRYIQGEGSCLSPPSSDGSLLDSPPPSPNLLGSPPRDAKSQTEQTQPLSLSLKPDPLAHLSMMPPPPALLLAEATHKASALCPNGALDLPPAALQPAAPSSSIAQPSTSSLHSHSSLAGTQPQPLSLVTKSLE

SEQ ID NO: 13 - protein, 122 aa, synthetic construct
  source 1..122: note = BC2 peptide
QVQLVESGGGLVQPGGSLTLSCTASGFTLDHYDIGWFRQAPGKEREGVSCINNSDDDTYYADSVKGRFTIFMNNAKDTVYLQMNSLKPEDTAIYYCAEARGCKRGRYEYDFWGQGTQVTVSS

SEQ ID NO: 14 - protein, 303 aa, Homo sapiens
  source 1..303: note = CHIP full length peptide
MKGKEEKEGGARLGAGGGSPEKSPSAQELKEQGNRLFVGRKYPEAAACYGRAITRNPLVAVYYTNRALCYLKMQQHEQALADCRRALELDGQSVKAHFFLGQCQLEMESYDEAIANLQRAYSLAKEQRLNFGDDIPSALRIAKKKRWNSIEERRIHQESELHSYLSRLIAAERERELEECQRNHEGDEDDSHVRAQQACIEAKHDKYMADMDELFSQVDEKRKKRDIPDYLCGKISFELMREPCITPSGITYDRKDIEEHLQRVGHFDPVTRSPLTQEQLIPNLAMKEVIDAFISENGWVEDY

SEQ ID NO: 15 - protein, 228 aa, Homo sapiens
  source 1..228: note = RNF114 full length peptide
MAAQQRDCGGAAQLAGPAAEADPLGRFTCPVCLEVYEKPVQVPCGHVFCSACLQECLKPKKPVCGVCRSALAPGVRAVELERQIESTETSCHGCRKNFFLSKIRSHVATCSKYQNYIMEGVKATIKDASLQPRNVPNRYTFPCPYCPEKNFDQEGLVEHCKLFHSTDTKSVVCPICASMPWGDPNYRSANFREHIQRRHRFSYDTFVDYDVDEEDMMNQVLQRSIIDQ

SEQ ID NO: 16 - protein, 232 aa, Homo sapiens
  source 1..232: note = RNF125 full length peptide
MGSVLSTDSGKSAPASATARALERRRDPELPVTSFDCAVCLEVLHQPVRTRCGHVFCRSCIATSLKNNKWTCPYCRAYLPSEGVPATDVAKRMKSEYKNCAECDTLVCLSEMRAHIRTCQKYIDKYGPLQELEETAARCVCPFCQRELYEDSLLDHCITHHRSERRPVFCPLCRLIPDENPSSFSGSLIRHLQVSHTLFYDDFIDFNIIEEALIRRVLDRSLLEYVNHSNTT

SEQ ID NO: 17 - protein, 245 aa, Homo sapiens
  source 1..245: note = RNF138 full length peptide
MAEDLSAATSYTEDDFYCPVCQEVLKTPVRTTACQHVFCRKCFLTAMRESGAHCPLCRGNVTRRERACPERALDLENIMRKFSGSCRCCAKQIKFYRMRHHYKSCKKYQDEYGVSSIIPNFQISQDSVGNSNRSETSTSDNTETYQENTSSSGHPTFKCPLCQESNFTRQRLLDHCNSNHLFQIVPVTCPICVSLPWGDPSQITRNFVSHLNQRHQFDYGEFVNLQLDEETQYQTAVEESFQVNI

SEQ ID NO: 18 - protein, 237 aa, Homo sapiens
  source 1..237: note = RNF166 full length peptide
MAMFRSLVASAQQRQPPAGPAGGDSGLEAQYTCPICLEVYHRPVAIGSCGHTFCGECLQPCLQVPSPLCPLCRLPFDPKKVDKATHVEKQLSSYKAPCRGCNKKVTLAKMRVHISSCLKVQEQMANCPKFVPVVPTSQPIPSNIPNRSTFACPYCGARNLDQQELVKHCVESHRSDPNRVVCPICSAMPWGDPSYKSANFLQHLLHRHKFSYDTFVDYSIDEEAAFQAALALSLSEN

SEQ ID NO: 19 - protein, 395 aa, Homo sapiens
  source 1..395: note = NHLRC1 full length peptide
MAAEASESGPALHELMREAEISLLECKVCFEKFGHRQQRRPRNLSCGHVVCLACVAALAHPRTLALECPFCRRACRGCDTSDCLPVLHLIELLGSALRQSPAAHRAAPSAPGALTCHHTFGGWGTLVNPTGLALCPKTGRVVVVHDGRRRVKIFDSGGGCAHQFGEKGDAAQDIRYPVDVTITNDCHVVVTDAGDRSIKVFDFFGQIKLVIGGQFSLPWGVETTPQNGIVVTDAEAGSLHLLDVDFAEGVLRRTERLQAHLCNPRGVAVSWLTGAIAVLEHPLALGTGVCSTRVKVFSSSMQLVGQVDTFGLSLYFPSKITASAVTFDHQGNVIVADTSGPAILCLGKPEEFPVPKPMVTHGLSHPVALTFTKENSLLVLDTASHSIKVYKVDWG

SEQ ID NO: 20 - protein, 982 aa, Homo sapiens
  source 1..982: note = CBL-b (Y363E) full length peptide
MANSMNGRNPGGRGGNPRKGRILGIIDAIQDAVGPPKQAAADRRTVEKTWKLMDKVVRLCQNPKLQLKNSPPYILDILPDTYQHLRLILSKYDDNQKLAQLSENEYFKIYIDSLMKKSKRAIRLFKEGKERMYEEQSQDRRNLTKLSLIFSHMLAEIKAIFPNGQFQGDNFRITKADAAEFWRKFFGDKTIVPWKVFRQCLHEVHQISSGLEAMALKSTIDLTCNDYISVFEFDIFTRLFQPWGSILRNWNFLAVTHPGYMAFLTYDEVKARLQKYSTKPGSYIFRLSCTRLGQWAIGYVTGDGNILQTIPHNKPLFQALIDGSREGFYLYPDGRSYNPDLTGLCEPTPHDHIKVTQEQYELECEMGSTFQLCKICAENDKDVKIEPCGHLMCTSCLTAWQESDGQGCPFCRCEIKGTEPIIVDPFDPRDEGSRCCSIIDPFGMPMLDLDDDDDREESLMMNRLANVRKCTDRQNSPVTSPGSSPLAQRRKPQPDPLQIPHLSLPPVPPRLDLIQKGIVRSPCGSPTGSPKSSPCMVRKQDKPLPAPPPPLRDPPPPPPERPPPIPPDNRLSRHIHHVESVPSRDPPMPLEAWCPRDVFGTNQLVGCRLLGEGSPKPGITASSNVNGRHSRVGSDPVLMRKHRRHDLPLEGAKVFSNGHLGSEEYDVPPRLSPPPPVTTLLPSIKCTGPLANSLSEKTRDPVEEDDDEYKIPSSHPVSLNSQPSHCHNVKPPVRSCDNGHCMLNGTHGPSSEKKSNIPDLSIYLKGDVFDSASDPVPLPPARPPTRDNPKHGSSLNRTPSDYDLLIPPLGEDAFDALPPSLPPPPPPARHSLIEHSKPPGSSSRPSSGQDLFLLPSDPFVDLASGQVPLPPARRLPGENVKTNRTSQDYDQLPSCSDGSQAPARPPKPRPRRTAPEIHHRKPHGPEAALENVDAKIAKLMGEGYAFEEVKRALEIAQNNVEVARSILREFAFPPPVSPRLNL

SEQ ID NO: 21 - protein, 475 aa, Homo sapiens [sequence omitted]

SEQ ID NO: 22 - protein, 875 aa, Homo sapiens
  source 1..875: note = E6AP full length peptide
MEKLHQCYWKSGEPQSDDIEASRMKRAAAKHLIERYYHQLTEGCGNEACTNEFCASCPTFLRMDNNAAAIKALELYKINAKLCDPHPSKKGASSAYLENSKGAPNNSCSEIKMNKKGARIDFKDVTYLTEEKVYEILELCREREDYSPLIRVIGRVFSSAEALVQSFRKVKQHTKEELKSLQAKDEDKDEDEKEKAACSAAAMEEDSEASSSRIGDSSQGDNNLQKLGPDDVSVDIDAIRRVYTRLLSNEKIETAFLNALVYLSPNVECDLTYHNVYSRDPNYLNLFIIVMENRNLHSPEYLEMALPLFCKAMSKLPLAAQGKLIRLWSKYNADQIRRMMETFQQLITYKVISNEFNSRNLVNDDDAIVAASKCLKMVYYANVVGGEVDTNHNEEDDEEPIPESSELTLQELLGEERRNKKGPRVDPLETELGVKTLDCRKPLIPFEEFINEPLNEVLEMDKDYTFFKVETENKFSFMTCPFILNAVTKNLGLYYDNRIRMYSERRITVLYSLVQGQQLNPYLRLKVRRDHIIDDALVRLEMIAMENPADLKKQLYVEFEGEQGVDEGGVSKEFFQLVVEEIFNPDIGMFTYDESTKLFWFNPSSFETEGQFTLIGIVLGLAIYNNCILDVHFPMVVYRKLMGKKGTFRDLGDSHPVLYQSLKDLLEYEGNVEDDMMITFQISQTDLFGNPMMYDLKENGDKIPITNENRKEFVNLYSDYILNKSVEKQFKAFRRGFHMVTNESPLKYLFRPEEIELLICGSRNLDFQALEETTEYDGGYTRDSVLIREFWEIVHSFTDEQKRLFLQFTTGTDRAPVGGLGKLKMIIAKNGPDTERLPTSHTCFNVLLLPEYSSKEKLKERLLKAITYAKGFGML

SEQ ID NO: 23 - protein, 707 aa, Homo sapiens
  source 1..707: note = FBXW7 alpha full length peptide
MNQELLSVGSKRRRTGGSLRGNPSSSQVDEEQMNRVVEEEQQQQLRQQEEEHTARNGEVVGVEPRPGGQNDSQQGQLEENNNRFISVDEDSSGNQEEQEEDEEHAGEQDEEDEEEEEMDQESDDFDQSDDSSREDEHTHTNSVTNSSSIVDLPVHQLSSPFYTKTTKMKRKLDHGSEVRSFSLGKKPCKVSEYTSTTGLVPCSATPTTFGDLRAANGQGQQRRRITSVQPPTGLQEWLKMFQSWSGPEKLLALDELIDSCEPTQVKHMMQVIEPQFQRDFISLLPKELALYVLSFLEPKDLLQAAQTCRYWRILAEDNLLWREKCKEEGIDEPLHIKRRKVIKPGFIHSPWKSAYIRQHRIDTNWRRGELKSPKVLKGHDDHVITCLQFCGNRIVSGSDDNTLKVWSAVTGKCLRTLVGHTGGVWSSQMRDNIIISGSTDRTLKVWNAETGECIHTLYGHTSTVRCMHLHEKRVVSGSRDATLRVWDIETGQCLHVLMGHVAAVRCVQYDGRRVVSGAYDFMVKVWDPETETCLHTLQGHTNRVYSLQFDGIHVVSGSLDTSIRVWDVETGNCIHTLTGHQSLTSGMELKDNILVSGNADSTVKIWDIKTGQCLQTLQGPNKHQSAVTCLQFNKNFVITSSDDGTVKLWDLKTGEFIRNLVTLESGGSGGVVWRIRASNTKLVCAVGSRNGTEETKLLVLDFDVDMK

SEQ ID NO: 24 - protein, 627 aa, Homo sapiens
  source 1..627: note = FBXW7 beta full length peptide
MCVPRSGLILSCICLYCGVLLPVLLPNLPFLTCLSMSTLESVTYLPEKGLYCQRLPSSRTHGGTESLKGKNTENMGFYGTLKMIFYKMKRKLDHGSEVRSFSLGKKPCKVSEYTSTTGLVPCSATPTTFGDLRAANGQGQQRRRITSVQPPTGLQEWLKMFQSWSGPEKLLALDELIDSCEPTQVKHMMQVIEPQFQRDFISLLPKELALYVLSFLEPKDLLQAAQTCRYWRILAEDNLLWREKCKEEGIDEPLHIKRRKVIKPGFIHSPWKSAYIRQHRIDTNWRRGELKSPKVLKGHDDHVITCLQFCGNRIVSGSDDNTLKVWSAVTGKCLRTLVGHTGGVWSSQMRDNIIISGSTDRTLKVWNAETGECIHTLYGHTSTVRCMHLHEKRVVSGSRDATLRVWDIETGQCLHVLMGHVAAVRCVQYDGRRVVSGAYDFMVKVWDPETETCLHTLQGHTNRVYSLQFDGIHVVSGSLDTSIRVWDVETGNCIHTLTGHQSLTSGMELKDNILVSGNADSTVKIWDIKTGQCLQTLQGPNKHQSAVTCLQFNKNFVITSSDDGTVKLWDLKTGEFIRNLVTLESGGSGGVVWRIRASNTKLVCAVGSRNGTEETKLLVLDFDVDMK

SEQ ID NO: 25 - protein, 605 aa, Homo sapiens [sequence omitted]

SEQ ID NO: 26 - protein, 624 aa, Homo sapiens
  source 1..624: note = Keap1 full length peptide
MQPDPRPSGAGACCRFLPLQSQCPEGAGDAVMYASTECKAEVTPSQHGNRTFSYTLEDHTKQAFGIMNELRLSQQLCDVTLQVKYQDAPAAQFMAHKVVLASSSPVFKAMFTNGLREQGMEVVSIEGIHPKVMERLIEFAYTASISMGEKCVLHVMNGAVMYQIDSVVRACSDFLVQQLDPSNAIGIANFAEQIGCVELHQRAREYIYMHFGEVAKQEEFFNLSHCQLVTLISRDDLNVRCESEVFHACINWVKYDCEQRRFYVQALLRAVRCHSLTPNFLQMQLQKCEILQSDSRCKDYLVKIFEELTLHKPTQVMPCRAPKVGRLIYTAGGYFRQSLSYLEAYNPSDGTWLRLADLQVPRSGLAGCVVGGLLYAVGGRNNSPDGNTDSSALDCYNPMTNQWSPCAPMSVPRNRIGVGVIDGHIYAVGGSHGCIHHNSVERYEPERDEWHLVAPMLTRRIGVGVAVLNRLLYAVGGFDGTNRLNSAECYYPERNEWRMITAMNTIRSGAGVCVLHNCIYAAGGYDGQDQLNSVERYDVETETWTFVAPMKHRRSALGITVHQGRIYVLGGYDGHTFLDSVECYDPDTDTWSEVTRMTSGRSGVGVAVTMEPCRKQIDQQNCTC

SEQ ID NO: 27 - protein, 374 aa, Homo sapiens
  source 1..374: note = SPOP full length peptide
MSRVPSPPPPAEMSSGPVAESWCYTQIKVVKFSYMWTINNFSFCREEMGEVIKSSTFSSGANDKLKWCLRVNPKGLDEESKDYLSLYLLLVSCPKSEVRAKFKFSILNAKGEETKAMESQRAYRFVQGKDWGFKKFIRRDFLLDEANGLLPDDKLTLFCEVSVVQDSVNISGQNTMNMVKVPECRLADELGGLWENSRFTDCCLCVAGQEFQAHKAILAARSPVFSAMFEHEMEESKKNRVEINDVEPEVFKEMMCFIYTGKAPNLDKMADDLLAAADKYALERLKVMCEDALCSNLSVENAAEILILADLHSADQLKTQAVDFINYHASDVLETSGWKSMVVSHPHLVAEAYRSLASAQCPFLGPPRKRLKQS

SEQ ID NO: 28 - protein, 1507 aa, Homo sapiens
  source 1..1507: note = DCAF1 full length peptide
MTTVVVHVDSKAELTTLLEQWEKEHGSGQDMVPILTRMSQLIEKETEEYRKGDPDPFDDRHPGRADPECMLGHLLRILFKNDDFMNALVNAYVMTSREPPLNTAACRLLLDIMPGLETAVVFQEKEGIVENLFKWAREADQPLRTYSTGLLGGAMENQDIAANYRDENSQLVAIVLRRLRELQLQEVALRQENKRPSPRKLSSEPLLPLDEEAVDMDYGDMAVDVVDGDQEEASGDMEISFHLDSGHKTSSRVNSTTKPEDGGLKKNKSAKQGDRENFRKAKQKLGFSSSDPDRMFVELSNSSWSEMSPWVIGTNYTLYPMTPAIEQRLILQYLTPLGEYQELLPIFMQLGSRELMMFYIDLKQTNDVLLTFEALKHLASLLLHNKFATEFVAHGGVQKLLEIPRPSMAATGVSMCLYYLSYNQDAMERVCMHPHNVLSDVVNYTLWLMECSHASGCCHATMFFSICFSFRAVLELFDRYDGLRRLVNLISTLEILNLEDQGALLSDDEIFASRQTGKHTCMALRKYFEAHLAIKLEQVKQSLQRTEGGILVHPQPPYKACSYTHEQIVEMMEFLIEYGPAQLYWEPAEVFLKLSCVQLLLQLISIACNWKTYYARNDTVRFALDVLAILTVVPKIQLQLAESVDVLDEAGSTVSTVGISIILGVAEGEFFIHDAEIQKSALQIIINCVCGPDNRISSIGKFISGTPRRKLPQNPKSSEHTLAKMWNVVQSNNGIKVLLSLLSIKMPITDADQIRALACKALVGLSRSSTVRQIISKLPLFSSCQIQQLMKEPVLQDKRSDHVKFCKYAAELIERVSGKPLLIGTDVSLARLQKADVVAQSRISFPEKELLLLIRNHLISKGLGETATVLTKEADLPMTAASHSSAFTPVTAAASPVSLPRTPRIANGIATRLGSHAAVGASAPSAPTAHPQPRPPQGPLALPGPSYAGNSPLIGRISFIRERPSPCNGRKIRVLRQKSDHGAYSQSPAIKKQLDRHLPSPPTLDSIITEYLREQHARCKNPVATCPPFSLFTPHQCPEPKQRRQAPINFTSRLNRRASFPKYGGVDGGCFDRHLIFSRFRPISVFREANEDESGFTCCAFSARERFLMLGTCTGQLKLYNVFSGQEEASYNCHNSAITHLEPSRDGSLLLTSATWSQPLSALWGMKSVFDMKHSFTEDHYVEFSKHSQDRVIGTKGDIAHIYDIQTGNKLLTLFNPDLANNYKRNCATFNPTDDLVLNDGVLWDVRSAQAIHKFDKFNMNISGVFHPNGLEVIINTEIWDLRTFHLLHTVPALDQCRVVFNHTGTVMYGAMLQADDEDDLMEERMKSPFGSSFRTFNATDYKPIATIDVKRNIFDLCTDTKDCYLAVIENQGSMDALNMDTVCRLYEVGRQRLAEDEDEEEDQEEEEQEEEDDDEDDDDTDDLDELDTDQLLEAELEEDDNNENAGEDGDNDFSPSDEELANLLEEGEDGEDEDSDADEEVELILGDTDSSDNSDLEDDIILSLNE

SEQ ID NO: 29 - protein, 176 aa, synthetic construct
  source 1..176: note = CHIP URD (128-303) peptide
RLNFGDDIPSALRIAKKKRWNSIEERRIHQESELHSYLSRLIAAERERELEECQRNHEGDEDDSHVRAQQACIEAKHDKYMADMDELFSQVDEKRKKRDIPDYLCGKISFELMREPCITPSGITYDRKDIEEHLQRVGHFDPVTRSPLTQEQLIPNLAMKEVIDAFISENGWVEDY

SEQ ID NO: 30 - protein, 95 aa, synthetic construct
  source 1..95: note = RNF114 URD (25-119) peptide
GRFTCPVCLEVYEKPVQVPCGHVFCSACLQECLKPKKPVCGVCRSALAPGVRAVELERQIESTETSCHGCRKNFFLSKIRSHVATCSKYQNYIME

SEQ ID NO: 31 - protein, 127 aa, synthetic construct
  source 1..127: note = RNF125 URD (2-128) peptide
GSVLSTDSGKSAPASATARALERRRDPELPVTSFDCAVCLEVLHQPVRTRCGHVFCRSCIATSLKNNKWTCPYCRAYLPSEGVPATDVAKRMKSEYKNCAECDTLVCLSEMRAHIRTCQKYIDKYGP

SEQ ID NO: 32 - protein, 100 aa, synthetic construct
  source 1..100: note = RNF138 URD (14-113) peptide
DDFYCPVCQEVLKTPVRTTACQHVFCRKCFLTAMRESGAHCPLCRGNVTRRERACPERALDLENIMRKFSGSCRCCAKQIKFYRMRHHYKSCKKYQDEYG

SEQ ID NO: 33 - protein, 101 aa, synthetic construct
  source 1..101: note = RNF166 URD (26-126) peptide
GLEAQYTCPICLEVYHRPVAIGSCGHTFCGECLQPCLQVPSPLCPLCRLPFDPKKVDKATHVEKQLSSYKAPCRGCNKKVTLAKMRVHISSCLKVQEQMAN

SEQ ID NO: 34 - protein, 92 aa, synthetic construct
  source 1..92: note = NHLRC1 URD (7-98) peptide
ESGPALHELMREAEISLLECKVCFEKFGHRQQRRPRNLSCGHVVCLACVAALAHPRTLALECPFCRRACRGCDTSDCLPVLHLIELLGSALR

SEQ ID NO: 35 - protein, 79 aa, synthetic construct
  source 1..79: note = CBL-b (Y363E) URD (349-427) peptide
PHDHIKVTQEQYELECEMGSTFQLCKICAENDKDVKIEPCGHLMCTSCLTAWQESDGQGCPFCRCEIKGTEPIIVDPFD

SEQ ID NO: 36 - protein, 277 aa, synthetic construct
  source 1..277: note = TRIM21 URD (1-277) peptide
MASAARLTMMWEEVTCPICLDPFVEPVSIECGHSFCQECISQVGKGGGSVCPVCRQRFLLKNLRPNRQLANMVNNLKEISQEAREGTQGERCAVHGERLHLFCEKDGKALCWVCAQSRKHRDHAMVPLEEAAQEYQEKLQVALGELRRKQELAEKLEVEIAIKRADWKKTVETQKSRIHAEFVQQKNFLVEEEQRQLQELEKDEREQLRILGEKEAKLAQQSQALQELISELDRRCHSSALELLQEVIIVLERSESWNLKDLDITSPELRSVCHVPG

SEQ ID NO: 37 - protein, 356 aa, synthetic construct
  source 1..356: note = E6AP URD (520-875) peptide
NPYLRLKVRRDHIIDDALVRLEMIAMENPADLKKQLYVEFEGEQGVDEGGVSKEFFQLVVEEIFNPDIGMFTYDESTKLFWFNPSSFETEGQFTLIGIVLGLAIYNNCILDVHFPMVVYRKLMGKKGTFRDLGDSHPVLYQSLKDLLEYEGNVEDDMMITFQISQTDLFGNPMMYDLKENGDKIPITNENRKEFVNLYSDYILNKSVEKQFKAFRRGFHMVTNESPLKYLFRPEEIELLICGSRNLDFQALEETTEYDGGYTRDSVLIREFWEIVHSFTDEQKRLFLQFTTGTDRAPVGGLGKLKMIIAKNGPDTERLPTSHTCFNVLLLPEYSSKEKLKERLLKAITYAKGFGML

SEQ ID NO: 38 - protein, 367 aa, synthetic construct
  source 1..367: note = FBXW7 alpha URD (2-368) W365S peptide
NQELLSVGSKRRRTGGSLRGNPSSSQVDEEQMNRVVEEEQQQQLRQQEEEHTARNGEVVGVEPRPGGQNDSQQGQLEENNNRFISVDEDSSGNQEEQEEDEEHAGEQDEEDEEEEEMDQESDDFDQSDDSSREDEHTHTNSVTNSSSIVDLPVHQLSSPFYTKTTKMKRKLDHGSEVRSFSLGKKPCKVSEYTSTTGLVPCSATPTTFGDLRAANGQGQQRRRITSVQPPTGLQEWLKMFQSWSGPEKLLALDELIDSCEPTQVKHMMQVIEPQFQRDFISLLPKELALYVLSFLEPKDLLQAAQTCRYWRILAEDNLLWREKCKEEGIDEPLHIKRRKVIKPGFIHSPWKSAYIRQHRIDTNSRRG

SEQ ID NO: 39 - protein, 287 aa, synthetic construct
  source 1..287: note = FBXW7 beta URD (2-228) W285S peptide
CVPRSGLILSCICLYCGVLLPVLLPNLPFLTCLSMSTLESVTYLPEKGLYCQRLPSSRTHGGTESLKGKNTENMGFYGTLKMIFYKMKRKLDHGSEVRSFSLGKKPCKVSEYTSTTGLVPCSATPTTFGDLRAANGQGQQRRRITSVQPPTGLQEWLKMFQSWSGPEKLLALDELIDSCEPTQVKHMMQVIEPQFQRDFISLLPKELALYVLSFLEPKDLLQAAQTCRYWRILAEDNLLWREKCKEEGIDEPLHIKRRKVIKPGFIHSPWKSAYIRQHRIDTNSRRG

SEQ ID NO: 40 - protein, 286 aa, synthetic construct
  source 1..286: note = beta-TRCP URD (2-287) W286S peptide
DPAEAVLQEKALKFMCSMPRSLWLGCSSLADSMPSLRCLYNPGTGALTAFQNSSEREDCNNGEPPRKIIPEKNSLRQTYNSCARLCLNQETVCLASTAMKTENCVAKTKLANGTSSMIVPKQRKLSASYEKEKELCVKYFEQWSESDQVEFVEHLISQMCHYQHGHINSYLKPMLQRDFITALPARGLDHIAENILSYLDAKSLCAAELVCKEWYRVTSDGMLWKKLIERMVRTDSLWRGLAERRGWGQYLFKNKPPDGNAPPNSFYRALYPKIIQDIETIESNSR

SEQ ID NO: 41 - protein, 321 aa, synthetic construct
  source 1..321: note = Keap1 URD (2-322) peptide
QPDPRPSGAGACCRFLPLQSQCPEGAGDAVMYASTECKAEVTPSQHGNRTFSYTLEDHTKQAFGIMNELRLSQQLCDVTLQVKYQDAPAAQFMAHKVVLASSSPVFKAMFTNGLREQGMEVVSIEGIHPKVMERLIEFAYTASISMGEKCVLHVMNGAVMYQIDSVVRACSDFLVQQLDPSNAIGIANFAEQIGCVELHQRAREYIYMHFGEVAKQEEFFNLSHCQLVTLISRDDLNVRCESEVFHACINWVKYDCEQRRFYVQALLRAVRCHSLTPNFLQMQLQKCEILQSDSRCKDYLVKIFEELTLHKPTQVMPCRAP

SEQ ID NO: 42 - protein, 228 aa, synthetic construct
  source 1..228: note = SPOP URD (147-374) peptide
NGLLPDDKLTLFCEVSVVQDSVNISGQNTMNMVKVPECRLADELGGLWENSRFTDCCLCVAGQEFQAHKAILAARSPVFSAMFEHEMEESKKNRVEINDVEPEVFKEMMCFIYTGKAPNLDKMADDLLAAADKYALERLKVMCEDALCSNLSVENAAEILILADLHSADQLKTQAVDFINYHASDVLETSGWKSMVVSHPHLVAEAYRSLASAQCPFLGPPRKRLKQS

SEQ ID NO: 43 - protein, 35 aa, synthetic construct
  source 1..35: note = DCAF1 truncated URD (1045-1079) peptide
QAPINFTSRLNRRASFPKYGGVDGGCFDRHLIFSR

SEQ ID NO: 44 - skipped

SEQ ID NO: 45 - protein, 4 aa, synthetic construct
  source 1..4: note = 2xGS linker peptide
GSGS

SEQ ID NO: 46 - protein, 6 aa, synthetic construct
  source 1..6: note = 3xGS linker peptide
GSGSGS

SEQ ID NO: 47 - protein, 8 aa, synthetic construct
  source 1..8: note = 4xGS linker peptide
GSGSGSGS

SEQ ID NO: 48 - protein, 10 aa, synthetic construct
  source 1..10: note = 5xGS linker peptide
GSGSGSGSGS

SEQ ID NO: 49 - protein, 12 aa, synthetic construct
  source 1..12: note = 6xGS linker peptide
GSGSGSGSGSGS

SEQ ID NO: 50 - protein, 9 aa, synthetic construct
  source 1..9: note = HA epitope tag peptide
YPYDVPDYA

SEQ ID NO: 51 - protein, 9 aa, synthetic construct
  source 1..9: note = nuclear localization signal (NLS) peptide
PAAKRVKLD

SEQ ID NO: 52 - protein, 279 aa, synthetic construct
  source 1..279: note = HA-NLS-3DX.1
MYPYDVPDYAPAAKRVKLDGSGSGSEVKLVESGGDLVKPGGSLKLSCAASGFTFSHYGMSWVRQTPDKRLEWVATIGSRGTYTHYPDSVKGRFTISRDNDKNALYLQMNSLRTEDTAMYYCARKSEFYYYGNTYYYSAMDYWGQGASVTVSSGGGGSGGGDSGGGGSDIVLTQSPASLAVSLGQRATISCRASESVDNYGFSFMNWFQQKPGQPPKLLIYATSNRGSGVPARFSGSGSGTDFSLNIHPVEEDDSAMYFCQQTKEVPWTFGGGTKLEIKR

SEQ ID NO: 53 - protein, 279 aa, synthetic construct
  source 1..279: note = HA-NLS-3DX.2
MYPYDVPDYAPAAKRVKLDGSGSGSDIVLTQSPASLAVSLGQRATISCRASESVDNYGFSFMNWFQQKPGQPPKLLIYATSNRGSGVPARFSGSGSGTDFSLNIHPVEEDDSAMYFCQQTKEVPWTFGGGTKLEIKRGGGGSGGGDSGGGGSEVKLVESGGDLVKPGGSLKLSCAASGFTFSHYGMSWVRQTPDKRLEWVATIGSRGTYTHYPDSVKGRFTISRDNDKNALYLQMNSLRTEDTAMYYCARKSEFYYYGNTYYYSAMDYWGQGASVTVSS

SEQ ID NO: 54 - protein, 117 aa, synthetic construct
  source 1..117: note = HA-NLS-OMOMYC
MYPYDVPDYAPAAKRVKLDGSGSGSSDTEENVKRRTHNVLERQRRNELKRSFFALRDQIPELENNEKAPKVVILKKATAYILSVQAETQKLISEIDLLRKQNEQLKHKLEQLRNSCA

SEQ ID NO: 55 - protein, 112 aa, synthetic construct
  source 1..112: note = HA-NLS-FOXP3 DBD
MYPYDVPDYAPAAKRVKLDGSGSGSRPPFTYATLIRWAILEAPEKQRTLNEIYHWFTRMFAFFRNHPATWKNAIRHNLSLHKCFVRVESEKGAVWTVDELEFRKKRSQRPSR

SEQ ID NO: 56 - protein, 139 aa, synthetic construct
  source 1..139: note = HA-NLS-VL12.3
MYPYDVPDYAPAAKRVKLDGSGSGSGSQPVLTQSPSVSAAPRQRVTISVSGSNSNIGSNTVNWIQQLPGRAPELLMYDDDLLAPGVSDRFSGSRSGTSASLTISGLQSEDEADYYAATWDDSLNGWVFGGGTKVTVLSG

SEQ ID NO: 57 - protein, 130 aa, synthetic construct
  source 1..130: note = HA-VL12.3
MYPYDVPDYAGSGSGSGSQPVLTQSPSVSAAPRQRVTISVSGSNSNIGSNTVNWIQQLPGRAPELLMYDDDLLAPGVSDRFSGSRSGTSASLTISGLQSEDEADYYAATWDDSLNGWVFGGGTKVTVLSG

SEQ ID NO: 58 - protein, 70 aa, synthetic construct
  source 1..70: note = HA-NLS-TCF4
MYPYDVPDYAPAAKRVKLDGSGSGSDDLGANDELISFKDEGEQEEKSSENSSAERDLADVKSSLVNESET

SEQ ID NO: 59 - protein, 61 aa, synthetic construct
  source 1..61: note = HA-TCF4
MYPYDVPDYAGSGSGSDDLGANDELISFKDEGEQEEKSSENSSAERDLADVKSSLVNESET

SEQ ID NO: 60 - protein, 147 aa, synthetic construct
  source 1..147: note = HA-NLS-BC2
MYPYDVPDYAPAAKRVKLDGSGSGSQVQLVESGGGLVQPGGSLTLSCTASGFTLDHYDIGWFRQAPGKEREGVSCINNSDDDTYYADSVKGRFTIFMNNAKDTVYLQMNSLKPEDTAIYYCAEARGCKRGRYEYDFWGQGTQVTVSS

SEQ ID NO: 61 - protein, 138 aa, synthetic construct
  source 1..138: note = HA-BC2
MYPYDVPDYAGSGSGSQVQLVESGGGLVQPGGSLTLSCTASGFTLDHYDIGWFRQAPGKEREGVSCINNSDDDTYYADSVKGRFTIFMNNAKDTVYLQMNSLKPEDTAIYYCAEARGCKRGRYEYDFWGQGTQVTVSS

SEQ ID NO: 62 - protein, 614 aa, synthetic construct
  source 1..614: note = HA-bTRCP
MYPYDVPDYADPAEAVLQEKALKFMCSMPRSLWLGCSSLADSMPSLRCLYNPGTGALTAFQNSSEREDCNNGEPPRKIIPEKNSLRQTYNSCARLCLNQETVCLASTAMKTENCVAKTKLANGTSSMIVPKQRKLSASYEKEKELCVKYFEQWSESDQVEFVEHLISQMCHYQHGHINSYLKPMLQRDFITALPARGLDHIAENILSYLDAKSLCAAELVCKEWYRVTSDGMLWKKLIERMVRTDSLWRGLAERRGWGQYLFKNKPPDGNAPPNSFYRALYPKIIQDIETIESNWRCGRHSLQRIHCRSETSKGVYCLQYDDQKIVSGLRDNTIKIWDKNTLECKRILTGHTGSVLCLQYDERVIITGSSDSTVRVWDVNTGEMLNTLIHHCEAVLHLRFNNGMMVTCSKDRSIAVWDMASPTDITLRRVLVGHRAAVNVVDFDDKYIVSASGDRTIKVWNTSTCEFVRTLNGHKRGIACLQYRDRLVVSGSSDNTIRLWDIECGACLRVLEGHEELVRCIRFDNKRIVSGAYDGKIKVWDLVAALDPRAPAGTLCLRTLVEHSGRVFRLQFDEFQIVSSSHDDTILIWDFLNDPAAQAEPPRSPSRTYTYISR

SEQ ID NO: 63 - protein, 276 aa, synthetic construct
  source 1..276: note = HA-NLS-INT41
MYPYDVPDYAPAAKRVKLDGSGSGSAEVQLVVSGGGLVKPGGSMILSCAASGFTFSNYSMNWVRQAPGKGLEWVSSISSSSEYIYYADFVKGRFTISRDNAKNSLYLQMDSLRAEDTAVYYCAWPGYRKAWGRGTLVTVSSGGGGSGGGGSGGGGSQSVLTQPASVSGSPGQSITISCAGTSSDVGGYNYVSWYQQHPGKAPKLMIYEDSKRPSGVSNRFSGSKSGNTASLTISGLRAEDEADYYCSYCASKGHWLFGGGTKLAVLGAAAEQKLIS

SEQ ID NO: 64 - protein, 267 aa, synthetic construct
  source 1..267: note = HA-INT41
MYPYDVPDYAGSGSGSAEVQLVVSGGGLVKPGGSMILSCAASGFTFSNYSMNWVRQAPGKGLEWVSSISSSSEYIYYADFVKGRFTISRDNAKNSLYLQMDSLRAEDTAVYYCAWPGYRKAWGRGTLVTVSSGGGGSGGGGSGGGGSQSVLTQPASVSGSPGQSITISCAGTSSDVGGYNYVSWYQQHPGKAPKLMIYEDSKRPSGVSNRFSGSKSGNTASLTISGLRAEDEADYYCSYCASKGHWLFGGGTKLAVLGAAAEQKLIS

SEQ ID NO: 65 - protein, 884 aa, synthetic construct
  source 1..884: note = HA-E6AP
MYPYDVPDYAEKLHQCYWKSGEPQSDDIEASRMKRAAAKHLIERYYHQLTEGCGNEACTNEFCASCPTFLRMDNNAAAIKALELYKINAKLCDPHPSKKGASSAYLENSKGAPNNSCSEIKMNKKGARIDFKDVTYLTEEKVYEILELCREREDYSPLIRVIGRVFSSAEALVQSFRKVKQHTKEELKSLQAKDEDKDEDEKEKAACSAAAMEEDSEASSSRIGDSSQGDNNLQKLGPDDVSVDIDAIRRVYTRLLSNEKIETAFLNALVYLSPNVECDLTYHNVYSRDPNYLNLFIIVMENRNLHSPEYLEMALPLFCKAMSKLPLAAQGKLIRLWSKYNADQIRRMMETFQQLITYKVISNEFNSRNLVNDDDAIVAASKCLKMVYYANVVGGEVDTNHNEEDDEEPIPESSELTLQELLGEERRNKKGPRVDPLETELGVKTLDCRKPLIPFEEFINEPLNEVLEMDKDYTFFKVETENKFSFMTCPFILNAVTKNLGLYYDNRIRMYSERRITVLYSLVQGQQLNPYLRLKVRRDHIIDDALVRLEMIAMENPADLKKQLYVEFEGEQGVDEGGVSKEFFQLVVEEIFNPDIGMFTYDESTKLFWFNPSSFETEGQFTLIGIVLGLAIYNNCILDVHFPMVVYRKLMGKKGTFRDLGDSHPVLYQSLKDLLEYEGNVEDDMMITFQISQTDLFGNPMMYDLKENGDKIPITNENRKEFVNLYSDYILNKSVEKQFKAFRRGFHMVTNESPLKYLFRPEEIELLICGSRNLDFQALEETTEYDGGYTRDSVLIREFWEIVHSFTDEQKRLFLQFTTGTDRAPVGGLGKLKMIIAKNGPDTERLPTSHTCFNVLLLPEYSSKEKLKERLLKAITYAKGFGML

SEQ ID NO: 66 - protein, 716 aa, synthetic construct
  source 1..716: note = HA-FBXW7 alpha(WT) peptide
MYPYDVPDYANQELLSVGSKRRRTGGSLRGNPSSSQVDEEQMNRVVEEEQQQQLRQQEEEHTARNGEVVGVEPRPGGQNDSQQGQLEENNNRFISVDEDSSGNQEEQEEDEEHAGEQDEEDEEEEEMDQESDDFDQSDDSSREDEHTHTNSVTNSSSIVDLPVHQLSSPFYTKTTKMKRKLDHGSEVRSFSLGKKPCKVSEYTSTTGLVPCSATPTTFGDLRAANGQGQQRRRITSVQPPTGLQEWLKMFQSWSGPEKLLALDELIDSCEPTQVKHMMQVIEPQFQRDFISLLPKELALYVLSFLEPKDLLQAAQTCRYWRILAEDNLLWREKCKEEGIDEPLHIKRRKVIKPGFIHSPWKSAYIRQHRIDTNWRRGELKSPKVLKGHDDHVITCLQFCGNRIVSGSDDNTLKVWSAVTGKCLRTLVGHTGGVWSSQMRDNIIISGSTDRTLKVWNAETGECIHTLYGHTSTVRCMHLHEKRVVSGSRDATLRVWDIETGQCLHVLMGHVAAVRCVQYDGRRVVSGAYDFMVKVWDPETETCLHTLQGHTNRVYSLQFDGIHVVSGSLDTSIRVWDVETGNCIHTLTGHQSLTSGMELKDNILVSGNADSTVKIWDIKTGQCLQTLQGPNKHQSAVTCLQFNKNFVITSSDDGTVKLWDLKTGEFIRNLVTLESGGSGGVVWRIRASNTKLVCAVGSRNGTEETKLLVLDFDVDMK

SEQ ID NO: 67 - protein, 716 aa, synthetic construct
  source 1..716: note = HA-FBXW7 alpha (R456C) peptide
MYPYDVPDYANQELLSVGSKRRRTGGSLRGNPSSSQVDEEQMNRVVEEEQQQQLRQQEEEHTARNGEVVGVEPRPGGQNDSQQGQLEENNNRFISVDEDSSGNQEEQEEDEEHAGEQDEEDEEEEEMDQESDDFDQSDDSSREDEHTHTNSVTNSSSIVDLPVHQLSSPFYTKTTKMKRKLDHGSEVRSFSLGKKPCKVSEYTSTTGLVPCSATPTTFGDLRAANGQGQQRRRITSVQPPTGLQEWLKMFQSWSGPEKLLALDELIDSCEPTQVKHMMQVIEPQFQRDFISLLPKELALYVLSFLEPKDLLQAAQTCRYWRILAEDNLLWREKCKEEGIDEPLHIKRRKVIKPGFIHSPWKSAYIRQHRIDTNWRRGELKSPKVLKGHDDHVITCLQFCGNRIVSGSDDNTLKVWSAVTGKCLRTLVGHTGGVWSSQMRDNIIISGSTDRTLKVWNAETGECIHTLYGHTSTVCCMHLHEKRVVSGSRDATLRVWDIETGQCLHVLMGHVAAVRCVQYDGRRVVSGAYDFMVKVWDPETETCLHTLQGHTNRVYSLQFDGIHVVSGSLDTSIRVWDVETGNCIHTLTGHQSLTSGMELKDNILVSGNADSTVKIWDIKTGQCLQTLQGPNKHQSAVTCLQFNKNFVITSSDDGTVKLWDLKTGEFIRNLVTLESGGSGGVVWRIRASNTKLVCAVGSRNGTEETKLLVLDFDVDMK

SEQ ID NO: 68 - protein, 716 aa, synthetic construct
  source 1..716: note = HA-FBXW7 alpha S10N, S18N, S176N, T205N peptide
MYPYDVPDYANQELLSVGNKRRRTGGNLRGNPSSSQVDEEQMNRVVEEEQQQQLRQQEEEHTARNGEVVGVEPRPGGQNDSQQGQLEENNNRFISVDEDSSGNQEEQEEDEEHAGEQDEEDEEEEEMDQESDDFDQSDDSSREDEHTHTNSVTNSSSIVDLPVHQLSSPFYTKTTKMKRKLDHGNEVRSFSLGKKPCKVSEYTSTTGLVPCSANPTTFGDLRAANGQGQQRRRITSVQPPTGLQEWLKMFQSWSGPEKLLALDELIDSCEPTQVKHMMQVIEPQFQRDFISLLPKELALYVLSFLEPKDLLQAAQTCRYWRILAEDNLLWREKCKEEGIDEPLHIKRRKVIKPGFIHSPWKSAYIRQHRIDTNWRRGELKSPKVLKGHDDHVITCLQFCGNRIVSGSDDNTLKVWSAVTGKCLRTLVGHTGGVWSSQMRDNIIISGSTDRTLKVWNAETGECIHTLYGHTSTVRCMHLHEKRVVSGSRDATLRVWDIETGQCLHVLMGHVAAVRCVQYDGRRVVSGAYDFMVKVWDPETETCLHTLQGHTNRVYSLQFDGIHVVSGSLDTSIRVWDVETGNCIHTLTGHQSLTSGMELKDNILVSGNADSTVKIWDIKTGQCLQTLQGPNKHQSAVTCLQFNKNFVITSSDDGTVKLWDLKTGEFIRNLVTLESGGSGGVVWRIRASNTKLVCAVGSRNGTEETKLLVLDFDVDMK

SEQ ID NO: 69 - DNA, 2151 bp, synthetic construct
  source 1..2151: mol_type = other DNA; note = HA-FBXW7 alpha(WT) nucleic acid
atgtacccatacgatgttccagattacgctaatcaggaactgctctctgtgggcagcaaaagacgacgaactggaggctctctgagaggtaacccttcctcaagccaggtagatgaagaacagatgaatcgtgtggtagaggaggaacagcaacagcaactcagacaacaagaggaggagcacactgcaaggaatggtgaagttgttggagtagaacctagacctggaggccaaaatgattcccagcaaggacagttggaagaaaacaataatagatttatttcggtagatgaggactcctcaggaaaccaagaagaacaagaggaagatgaagaacatgctggtgaacaagatgaggaggatgaggaggaggaggagatggaccaggagagtgacgattttgatcagtctgatgatagtagcagagaagatgaacatacacatactaacagtgtcacgaactccagtagtattgtggacctgcccgttcaccaactctcctccccattctatacaaaaacaacaaaaatgaaaagaaagttggaccatggttctgaggtccgctctttttctttgggaaagaaaccatgcaaagtctcagaatatacaagtaccactgggcttgtaccatgttcagcaacaccaacaacttttggggacctcagagcagccaatggccaagggcaacaacgacgccgaattacatctgtccagccacctacaggcctccaggaatggctaaaaatgtttcagagctggagtggaccagagaaattgcttgctttagatgaactcattgatagttgtgaaccaacacaagtaaaacatatgatgcaagtgatagaaccccagtttcaacgagacttcatttcattgctccctaaagagttggcactctatgtgctttcattcctggaacccaaagacctgctacaagcagctcagacatgtcgctactggagaattttggctgaagacaaccttctctggagagagaaatgcaaagaagaggggattgatgaaccattgcacatcaagagaagaaaagtaataaaaccaggtttcatacacagtccatggaaaagtgcatacatcagacagcacagaattgatactaactggaggcgaggagaactcaaatctcctaaggtgctgaaaggacatgatgatcatgtgatcacatgcttacagttttgtggtaaccgaatagttagtggttctgatgacaacactttaaaagtttggtcagcagtcacaggcaaatgtctgagaacattagtgggacatacaggtggagtatggtcatcacaaatgagagacaacatcatcattagtggatctacagatcggacactcaaagtgtggaatgcagagactggagaatgtatacacaccttatatgggcatacttccactgtgcgttgtatgcatcttcatgaaaaaagagttgttagcggttctcgagatgccactcttagggtttgggatattgagacaggccagtgtttacatgttttgatgggtcatgttgcagcagtccgctgtgttcaatatgatggcaggagggttgttagtggagcatatgattttatggtaaaggtgtgggatccagagactgaaacctgtctacacacgttgcaggggcatactaatagagtctattcattacagtttgatggtatccatgtggtgagtggatctcttgatacatcaatccgtgtttgggatgtggagacagggaattgcattcacacgttaacagggcaccagtcgttaacaagtggaatggaactcaaagacaatattcttgtctctgggaatgcagattctacagttaaaatctgggatatcaaaacaggacagtgtttacaaacattgcaaggtcccaacaagcatcagagtgctgtgacctgtttacagttcaacaagaactttgtaattaccagctcagatgatggaactgtaaaactatgggacttgaaaacgggtgaatttattcgaaacctagtcacattggagagtggggggagtgggggagttgtgtggcggatcagagcctcaaacacaaagctggtgtgtgcagttgggagtcggaatgggactgaagaaaccaagctgctggtgctggactttgatgtggacatgaagtga

SEQ ID NO: 70 - DNA, 2151 bp, synthetic construct
  source 1..2151: mol_type = other DNA; note = HA-FBXW7 alpha (R456C) nucleic acid
atgtacccatacgatgttccagattacgctaatcaggaactgctctctgtgggcagcaaaagacgacgaactggaggctctctgagaggtaacccttcctcaagccaggtagatgaagaacagatgaatcgtgtggtagaggaggaacagcaacagcaactcagacaacaagaggaggagcacactgcaaggaatggtgaagttgttggagtagaacctagacctggaggccaaaatgattcccagcaaggacagttggaagaaaacaataatagatttatttcggtagatgaggactcctcaggaaaccaagaagaacaagaggaagatgaagaacatgctggtgaacaagatgaggaggatgaggaggaggaggagatggaccaggagagtgacgattttgatcagtctgatgatagtagcagagaagatgaacatacacatactaacagtgtcacgaactccagtagtattgtggacctgcccgttcaccaactctcctccccattctatacaaaaacaacaaaaatgaaaagaaagttggaccatggttctgaggtccgctctttttctttgggaaagaaaccatgcaaagtctcagaatatacaagtaccactgggcttgtaccatgttcagcaacaccaacaacttttggggacctcagagcagccaatggccaagggcaacaacgacgccgaattacatctgtccagccacctacaggcctccaggaatggctaaaaatgtttcagagctggagtggaccagagaaattgcttgctttagatgaactcattgatagttgtgaaccaacacaagtaaaacatatgatgcaagtgatagaaccccagtttcaacgagacttcatttcattgctccctaaagagttggcactctatgtgctttcattcctggaacccaaagacctgctacaagcagctcagacatgtcgctactggagaattttggctgaagacaaccttctctggagagagaaatgcaaagaagaggggattgatgaaccattgcacatcaagagaagaaaagtaataaaaccaggtttcatacacagtccatggaaaagtgcatacatcagacagcacagaattgatactaactggaggcgaggagaactcaaatctcctaaggtgctgaaaggacatgatgatcatgtgatcacatgcttacagttttgtggtaaccgaatagttagtggttctgatgacaacactttaaaagtttggtcagcagtcacaggcaaatgtctgagaacattagtgggacatacaggtggagtatggtcatcacaaatgagagacaacatcatcattagtggatctacagatcggacactcaaagtgtggaatgcagagactggagaatgtatacacaccttatatgggcatacttccactgtgtgttgtatgcatcttcatgaaaaaagagttgttagcggttctcgagatgccactcttagggtttgggatattgagacaggccagtgtttacatgttttgatgggtcatgttgcagcagtccgctgtgttcaatatgatggcaggagggttgttagtggagcatatgattttatggtaaaggtgtgggatccagagactgaaacctgtctacacacgttgcaggggcatactaatagagtctattcattacagtttgatggtatccatgtggtgagtggatctcttgatacatcaatccgtgtttgggatgtggagacagggaattgcattcacacgttaacagggcaccagtcgttaacaagtggaatggaactcaaagacaatattcttgtctctgggaatgcagattctacagttaaaatctgggatatcaaaacaggacagtgtttacaaacattgcaaggtcccaacaagcatcagagtgctgtgacctgtttacagttcaacaagaactttgtaattaccagctcagatgatggaactgtaaaactatgggacttgaaaacgggtgaatttattcgaaacctagtcacattggagagtggggggagtgggggagttgtgtggcggatcagagcctcaaacacaaagctggtgtgtgcagttgggagtcggaatgggactgaagaaaccaagctgctggtgctggactttgatgtggacatgaagtga

SEQ ID NO: 71 - DNA, 2151 bp, synthetic construct
  source 1..2151: mol_type = other DNA; note = HA-FBXW7 alpha S10N, S18N, S176N, T205N nucleic acid
atgtacccatacgatgttccagattacgctaatcaggaactgctctctgtgggcaacaaaagacgacgaactggaggcaatctgagaggtaacccttcctcaagccaggtagatgaagaacagatgaatcgtgtggtagaggaggaacagcaacagcaactcagacaacaagaggaggagcacactgcaaggaatggtgaagttgttggagtagaacctagacctggaggccaaaatgattcccagcaaggacagttggaagaaaacaataatagatttatttcggtagatgaggactcctcaggaaaccaagaagaacaagaggaagatgaagaacatgctggtgaacaagatgaggaggatgaggaggaggaggagatggaccaggagagtgacgattttgatcagtctgatgatagtagcagagaagatgaacatacacatactaacagtgtcacgaactccagtagtattgtggacctgcccgttcaccaactctcctccccattctatacaaaaacaacaaaaatgaaaagaaagttggaccatggtaatgaggtccgctctttttctttgggaaagaaaccatgcaaagtctcagaatatacaagtaccactgggcttgtaccatgttcagcaaatccaacaacttttggggacctcagagcagccaatggccaagggcaacaacgacgccgaattacatctgtccagccacctacaggcctccaggaatggctaaaaatgtttcagagctggagtggaccagagaaattgcttgctttagatgaactcattgatagttgtgaaccaacacaagtaaaacatatgatgcaagtgatagaaccccagtttcaacgagacttcatttcattgctccctaaagagttggcactctatgtgctttcattcctggaacccaaagacctgctacaagcagctcagacatgtcgctactggagaattttggctgaagacaaccttctctggagagagaaatgcaaagaagaggggattgatgaaccattgcacatcaagagaagaaaagtaataaaaccaggtttcatacacagtccatggaaaagtgcatacatcagacagcacagaattgatactaactggaggcgaggagaactcaaatctcctaaggtgctgaaaggacatgatgatcatgtgatcacatgcttacagttttgtggtaaccgaatagttagtggttctgatgacaacactttaaaagtttggtcagcagtcacaggcaaatgtctgagaacattagtgggacatacaggtggagtatggtcatcacaaatgagagacaacatcatcattagtggatctacagatcggacactcaaagtgtggaatgcagagactggagaatgtatacacaccttatatgggcatacttccactgtgcgttgtatgcatcttcatgaaaaaagagttgttagcggttctcgagatgccactcttagggtttgggatattgagacaggccagtgtttacatgttttgatgggtcatgttgcagcagtccgctgtgttcaatatgatggcaggagggttgttagtggagcatatgattttatggtaaaggtgtgggatccagagactgaaacctgtctacacacgttgcaggggcatactaatagagtctattcattacagtttgatggtatccatgtggtgagtggatctcttgatacatcaatccgtgtttgggatgtggagacagggaattgcattcacacgttaacagggcaccagtcgttaacaagtggaatggaactcaaagacaatattcttgtctctgggaatgcagattctacagttaaaatctgggatatcaaaacaggacagtgtttacaaacattgcaaggtcccaacaagcatcagagtgctgtgacctgtttacagttcaacaagaactttgtaattaccagctcagatgatggaactgtaaaactatgggacttgaaaacgggtgaatttattcgaaacctagtcacattggagagtggggggagtgggggagttgtgtggcggatcagagcctcaaacacaaagctggtgtgtgcagttgggagtcggaatgggactgaagaaaccaagctgctggtgctggactttgatgtggacatgaagtga

SEQ ID NO: 72 - protein, 446 aa, synthetic construct
  source 1..446: note = 3DX.1-(GS)1-CHIP-NLS peptide
MEVKLVESGGDLVKPGGSLKLSCAASGFTFSHYGMSWVRQTPDKRLEWVATIGSRGTYTHYPDSVKGRFTISRDNDKNALYLQMNSLRTEDTAMYYCARKSEFYYYGNTYYYSAMDYWGQGASVTVSSGGGGSGGGDSGGGGSDIVLTQSPASLAVSLGQRATISCRASESVDNYGFSFMNWFQQKPGQPPKLLIYATSNRGSGVPARFSGSGSGTDFSLNIHPVEEDDSAMYFCQQTKEVPWTFGGGTKLEIKRGSRLNFGDDIPSALRIAKKKRWNSIEERRIHQESELHSYLSRLIAAERERELEECQRNHEGDEDDSHVRAQQACIEAKHDKYMADMDELFSQVDEKRKKRDIPDYLCGKISFELMREPCITPSGITYDRKDIEEHLQRVGHFDPVTRSPLTQEQLIPNLAMKEVIDAFISENGWVEDYGSGSPAAKRVKLD

SEQ ID NO: 73 - protein, 448 aa, synthetic construct
  source 1..448: note = 3DX.1-(GS)2-CHIP-NLS peptide
MEVKLVESGGDLVKPGGSLKLSCAASGFTFSHYGMSWVRQTPDKRLEWVATIGSRGTYTHYPDSVKGRFTISRDNDKNALYLQMNSLRTEDTAMYYCARKSEFYYYGNTYYYSAMDYWGQGASVTVSSGGGGSGGGDSGGGGSDIVLTQSPASLAVSLGQRATISCRASESVDNYGFSFMNWFQQKPGQPPKLLIYATSNRGSGVPARFSGSGSGTDFSLNIHPVEEDDSAMYFCQQTKEVPWTFGGGTKLEIKRGSGSRLNFGDDIPSALRIAKKKRWNSIEERRIHQESELHSYLSRLIAAERERELEECQRNHEGDEDDSHVRAQQACIEAKHDKYMADMDELFSQVDEKRKKRDIPDYLCGKISFELMREPCITPSGITYDRKDIEEHLQRVGHFDPVTRSPLTQEQLIPNLAMKEVIDAFISENGWVEDYGSGSPAAKRVKLD

SEQ ID NO: 74 - protein, 450 aa, synthetic construct
  source 1..450: note = 3DX.1-(GS)3-CHIP-NLS peptide
MEVKLVESGGDLVKPGGSLKLSCAASGFTFSHYGMSWVRQTPDKRLEWVATIGSRGTYTHYPDSVKGRFTISRDNDKNALYLQMNSLRTEDTAMYYCARKSEFYYYGNTYYYSAMDYWGQGASVTVSSGGGGSGGGDSGGGGSDIVLTQSPASLAVSLGQRATISCRASESVDNYGFSFMNWFQQKPGQPPKLLIYATSNRGSGVPARFSGSGSGTDFSLNIHPVEEDDSAMYFCQQTKEVPWTFGGGTKLEIKRGSGSGSRLNFGDDIPSALRIAKKKRWNSIEERRIHQESELHSYLSRLIAAERERELEECQRNHEGDEDDSHVRAQQACIEAKHDKYMADMDELFSQVDEKRKKRDIPDYLCGKISFELMREPCITPSGITYDRKDIEEHLQRVGHFDPVTRSPLTQEQLIPNLAMKEVIDAFISENGWVEDYGSGSPAAKRVKLD

SEQ ID NO: 75 - protein, 452 aa, synthetic construct
  source 1..452: note = 3DX.1-(GS)4-CHIP-NLS peptide
MEVKLVESGGDLVKPGGSLKLSCAASGFTFSHYGMSWVRQTPDKRLEWVATIGSRGTYTHYPDSVKGRFTISRDNDKNALYLQMNSLRTEDTAMYYCARKSEFYYYGNTYYYSAMDYWGQGASVTVSSGGGGSGGGDSGGGGSDIVLTQSPASLAVSLGQRATISCRASESVDNYGFSFMNWFQQKPGQPPKLLIYATSNRGSGVPARFSGSGSGTDFSLNIHPVEEDDSAMYFCQQTKEVPWTFGGGTKLEIKRGSGSGSGSRLNFGDDIPSALRIAKKKRWNSIEERRIHQESELHSYLSRLIAAERERELEECQRNHEGDEDDSHVRAQQACIEAKHDKYMADMDELFSQVDEKRKKRDIPDYLCGKISFELMREPCITPSGITYDRKDIEEHLQRVGHFDPVTRSPLTQEQLIPNLAMKEVIDAFISENGWVEDYGSGSPAAKRVKLD

SEQ ID NO: 76 - protein, 454 aa, synthetic construct
  source 1..454: note = 3DX.1-(GS)5-CHIP-NLS peptide
MEVKLVESGGDLVKPGGSLKLSCAASGFTFSHYGMSWVRQTPDKRLEWVATIGSRGTYTHYPDSVKGRFTISRDNDKNALYLQMNSLRTEDTAMYYCARKSEFYYYGNTYYYSAMDYWGQGASVTVSSGGGGSGGGDSGGGGSDIVLTQSPASLAVSLGQRATISCRASESVDNYGFSFMNWFQQKPGQPPKLLIYATSNRGSGVPARFSGSGSGTDFSLNIHPVEEDDSAMYFCQQTKEVPWTFGGGTKLEIKRGSGSGSGSGSRLNFGDDIPSALRIAKKKRWNSIEERRIHQESELHSYLSRLIAAERERELEECQRNHEGDEDDSHVRAQQACIEAKHDKYMADMDELFSQVDEKRKKRDIPDYLCGKISFELMREPCITPSGITYDRKDIEEHLQRVGHFDPVTRSPLTQEQLIPNLAMKEVIDAFISENGWVEDYGSGSPAAKRVKLD

SEQ ID NO: 77 - protein, 456 aa, synthetic construct
  source 1..456: note = 3DX.1-(GS)6-CHIP-NLS peptide
MEVKLVESGGDLVKPGGSLKLSCAASGFTFSHYGMSWVRQTPDKRLEWVATIGSRGTYTHYPDSVKGRFTISRDNDKNALYLQMNSLRTEDTAMYYCARKSEFYYYGNTYYYSAMDYWGQGASVTVSSGGGGSGGGDSGGGGSDIVLTQSPASLAVSLGQRATISCRASESVDNYGFSFMNWFQQKPGQPPKLLIYATSNRGSGVPARFSGSGSGTDFSLNIHPVEEDDSAMYFCQQTKEVPWTFGGGTKLEIKRGSGSGSGSGSGSRLNFGDDIPSALRIAKKKRWNSIEERRIHQESELHSYLSRLIAAERERELEECQRNHEGDEDDSHVRAQQACIEAKHDKYMADMDELFSQVDEKRKKRDIPDYLCGKISFELMREPCITPSGITYDRKDIEEHLQRVGHFDPVTRSPLTQEQLIPNLAMKEVIDAFISENGWVEDYGSGSPAAKRVKLD

SEQ ID NO: 78 - protein, 455 aa, synthetic construct
  source 1..455: note = 3DX.1-(GS)1-CHIP-NLS-HA peptide
MEVKLVESGGDLVKPGGSLKLSCAASGFTFSHYGMSWVRQTPDKRLEWVATIGSRGTYTHYPDSVKGRFTISRDNDKNALYLQMNSLRTEDTAMYYCARKSEFYYYGNTYYYSAMDYWGQGASVTVSSGGGGSGGGDSGGGGSDIVLTQSPASLAVSLGQRATISCRASESVDNYGFSFMNWFQQKPGQPPKLLIYATSNRGSGVPARFSGSGSGTDFSLNIHPVEEDDSAMYFCQQTKEVPWTFGGGTKLEIKRGSRLNFGDDIPSALRIAKKKRWNSIEERRIHQESELHSYLSRLIAAERERELEECQRNHEGDEDDSHVRAQQACIEAKHDKYMADMDELFSQVDEKRKKRDIPDYLCGKISFELMREPCITPSGITYDRKDIEEHLQRVGHFDPVTRSPLTQEQLIPNLAMKEVIDAFISENGWVEDYGSGSPAAKRVKLDYPYDVPDYA

SEQ ID NO: 79 - protein, 457 aa, synthetic construct
  source 1..457: note = 3DX.1-(GS)2-CHIP-NLS-HA peptide
MEVKLVESGGDLVKPGGSLKLSCAASGFTFSHYGMSWVRQTPDKRLEWVATIGSRGTYTHYPDSVKGRFTISRDNDKNALYLQMNSLRTEDTAMYYCARKSEFYYYGNTYYYSAMDYWGQGASVTVSSGGGGSGGGDSGGGGSDIVLTQSPASLAVSLGQRATISCRASESVDNYGFSFMNWFQQKPGQPPKLLIYATSNRGSGVPARFSGSGSGTDFSLNIHPVEEDDSAMYFCQQTKEVPWTFGGGTKLEIKRGSGSRLNFGDDIPSALRIAKKKRWNSIEERRIHQESELHSYLSRLIAAERERELEECQRNHEGDEDDSHVRAQQACIEAKHDKYMADMDELFSQVDEKRKKRDIPDYLCGKISFELMREPCITPSGITYDRKDIEEHLQRVGHFDPVTRSPLTQEQLIPNLAMKEVIDAFISENGWVEDYGSGSPAAKRVKLDYPYDVPDYA

SEQ ID NO: 80 - protein, 459 aa, synthetic construct
  source 1..459: note = 3DX.1-(GS)3-CHIP-NLS-HA peptide
MEVKLVESGGDLVKPGGSLKLSCAASGFTFSHYGMSWVRQTPDKRLEWVATIGSRGTYTHYPDSVKGRFTISRDNDKNALYLQMNSLRTEDTAMYYCARKSEFYYYGNTYYYSAMDYWGQGASVTVSSGGGGSGGGDSGGGGSDIVLTQSPASLAVSLGQRATISCRASESVDNYGFSFMNWFQQKPGQPPKLLIYATSNRGSGVPARFSGSGSGTDFSLNIHPVEEDDSAMYFCQQTKEVPWTFGGGTKLEIKRGSGSGSRLNFGDDIPSALRIAKKKRWNSIEERRIHQESELHSYLSRLIAAERERELEECQRNHEGDEDDSHVRAQQACIEAKHDKYMADMDELFSQVDEKRKKRDIPDYLCGKISFELMREPCITPSGITYDRKDIEEHLQRVGHFDPVTRSPLTQEQLIPNLAMKEVIDAFISENGWVEDYGSGSPAAKRVKLDYPYDVPDYA

SEQ ID NO: 81 - protein, 461 aa, synthetic construct
  source 1..461: note = 3DX.1-(GS)4-CHIP-NLS-HA peptide
MEVKLVESGGDLVKPGGSLKLSCAASGFTFSHYGMSWVRQTPDKRLEWVATIGSRGTYTHYPDSVKGRFTISRDNDKNALYLQMNSLRTEDTAMYYCARKSEFYYYGNTYYYSAMDYWGQGASVTVSSGGGGSGGGDSGGGGSDIVLTQSPASLAVSLGQRATISCRASESVDNYGFSFMNWFQQKPGQPPKLLIYATSNRGSGVPARFSGSGSGTDFSLNIHPVEEDDSAMYFCQQTKEVPWTFGGGTKLEIKRGSGSGSGSRLNFGDDIPSALRIAKKKRWNSIEERRIHQESELHSYLSRLIAAERERELEECQRNHEGDEDDSHVRAQQACIEAKHDKYMADMDELFSQVDEKRKKRDIPDYLCGKISFELMREPCITPSGITYDRKDIEEHLQRVGHFDPVTRSPLTQEQLIPNLAMKEVIDAFISENGWVEDYGSGSPAAKRVKLDYPYDVPDYA

SEQ ID NO: 82 - protein, 463 aa, synthetic construct
  source 1..463: note = 3DX.1-(GS)5-CHIP-NLS-HA peptide
MEVKLVESGGDLVKPGGSLKLSCAASGFTFSHYGMSWVRQTPDKRLEWVATIGSRGTYTHYPDSVKGRFTISRDNDKNALYLQMNSLRTEDTAMYYCARKSEFYYYGNTYYYSAMDYWGQGASVTVSSGGGGSGGGDSGGGGSDIVLTQSPASLAVSLGQRATISCRASESVDNYGFSFMNWFQQKPGQPPKLLIYATSNRGSGVPARFSGSGSGTDFSLNIHPVEEDDSAMYFCQQTKEVPWTFGGGTKLEIKRGSGSGSGSGSRLNFGDDIPSALRIAKKKRWNSIEERRIHQESELHSYLSRLIAAERERELEECQRNHEGDEDDSHVRAQQACIEAKHDKYMADMDELFSQVDEKRKKRDIPDYLCGKISFELMREPCITPSGITYDRKDIEEHLQRVGHFDPVTRSPLTQEQLIPNLAMKEVIDAFISENGWVEDYGSGSPAAKRVKLDYPYDVPDYA

SEQ ID NO: 83 - protein, 465 aa, synthetic construct
  source 1..465: note = 3DX.1-(GS)6-CHIP-NLS-HA peptide
MEVKLVESGGDLVKPGGSLKLSCAASGFTFSHYGMSWVRQTPDKRLEWVATIGSRGTYTHYPDSVKGRFTISRDNDKNALYLQMNSLRTEDTAMYYCARKSEFYYYGNTYYYSAMDYWGQGASVTVSSGGGGSGGGDSGGGGSDIVLTQSPASLAVSLGQRATISCRASESVDNYGFSFMNWFQQKPGQPPKLLIYATSNRGSGVPARFSGSGSGTDFSLNIHPVEEDDSAMYFCQQTKEVPWTFGGGTKLEIKRGSGSGSGSGSGSRLNFGDDIPSALRIAKKKRWNSIEERRIHQESELHSYLSRLIAAERERELEECQRNHEGDEDDSHVRAQQACIEAKHDKYMADMDELFSQVDEKRKKRDIPDYLCGKISFELMREPCITPSGITYDRKDIEEHLQRVGHFDPVTRSPLTQEQLIPNLAMKEVIDAFISENGWVEDYGSGSPAAKRVKLDYPYDVPDYA

SEQ ID NO: 84 - protein, 306 aa, synthetic construct
  source 1..306: note = NLS-DCAF1-(GS)1-3DX.1 peptide
PAAKRVKLDGSGSGSQAPINFTSRLNRRASFPKYGGVDGGCFDRHLIFSRGSEVKLVESGGDLVKPGGSLKLSCAASGFTFSHYGMSWVRQTPDKRLEWVATIGSRGTYTHYPDSVKGRFTISRDNDKNALYLQMNSLRTEDTAMYYCARKSEFYYYGNTYYYSAMDYWGQGASVTVSSGGGGSGGGDSGGGGSDIVLTQSPASLAVSLGQRATISCRASESVDNYGFSFMNWFQQKPGQPPKLLIYATSNRGSGVPARFSGSGSGTDFSLNIHPVEEDDSAMYFCQQTKEVPWTFGGGTKLEIKR

SEQ ID NO: 85 - protein, 308 aa, synthetic construct
  source 1..308: note = NLS-DCAF1-(GS)2-3DX.1 peptide
PAAKRVKLDGSGSGSQAPINFTSRLNRRASFPKYGGVDGGCFDRHLIFSRGSGSEVKLVESGGDLVKPGGSLKLSCAASGFTFSHYGMSWVRQTPDKRLEWVATIGSRGTYTHYPDSVKGRFTISRDNDKNALYLQMNSLRTEDTAMYYCARKSEFYYYGNTYYYSAMDYWGQGASVTVSSGGGGSGGGDSGGGGSDIVLTQSPASLAVSLGQRATISCRASESVDNYGFSFMNWFQQKPGQPPKLLIYATSNRGSGVPARFSGSGSGTDFSLNIHPVEEDDSAMYFCQQTKEVPWTFGGGTKLEIKR

SEQ ID NO: 86 - protein, 310 aa, synthetic construct
  source 1..310: note = NLS-DCAF1-(GS)3-3DX.1 peptide
PAAKRVKLDGSGSGSQAPINFTSRLNRRASFPKYGGVDGGCFDRHLIFSRGSGSGSEVKLVESGGDLVKPGGSLKLSCAASGFTFSHYGMSWVRQTPDKRLEWVATIGSRGTYTHYPDSVKGRFTISRDNDKNALYLQMNSLRTEDTAMYYCARKSEFYYYGNTYYYSAMDYWGQGASVTVSSGGGGSGGGDSGGGGSDIVLTQSPASLAVSLGQRATISCRASESVDNYGFSFMNWFQQKPGQPPKLLIYATSNRGSGVPARFSGSGSGTDFSLNIHPVEEDDSAMYFCQQTKEVPWTFGGGTKLEIKR

SEQ ID NO: 87 - protein, 312 aa, synthetic construct
  source 1..312: note = NLS-DCAF1-(GS)4-3DX.1 peptide
PAAKRVKLDGSGSGSQAPINFTSRLNRRASFPKYGGVDGGCFDRHLIFSRGSGSGSGSEVKLVESGGDLVKPGGSLKLSCAASGFTFSHYGMSWVRQTPDKRLEWVATIGSRGTYTHYPDSVKGRFTISRDNDKNALYLQMNSLRTEDTAMYYCARKSEFYYYGNTYYYSAMDYWGQGASVTVSSGGGGSGGGDSGGGGSDIVLTQSPASLAVSLGQRATISCRASESVDNYGFSFMNWFQQKPGQPPKLLIYATSNRGSGVPARFSGSGSGTDFSLNIHPVEEDDSAMYFCQQTKEVPWTFGGGTKLEIKR

SEQ ID NO: 88 - protein, 314 aa, synthetic construct
  source 1..314: note = NLS-DCAF1-(GS)5-3DX.1 peptide
PAAKRVKLDGSGSGSQAPINFTSRLNRRASFPKYGGVDGGCFDRHLIFSRGSGSGSGSGSEVKLVESGGDLVKPGGSLKLSCAASGFTFSHYGMSWVRQTPDKRLEWVATIGSRGTYTHYPDSVKGRFTISRDNDKNALYLQMNSLRTEDTAMYYCARKSEFYYYGNTYYYSAMDYWGQGASVTVSSGGGGSGGGDSGGGGSDIVLTQSPASLAVSLGQRATISCRASESVDNYGFSFMNWFQQKPGQPPKLLIYATSNRGSGVPARFSGSGSGTDFSLNIHPVEEDDSAMYFCQQTKEVPWTFGGGTKLEIKR

SEQ ID NO: 89 - protein, 316 aa, synthetic construct
  source 1..316: note = NLS-DCAF1-(GS)6-3DX.1 peptide
PAAKRVKLDGSGSGSQAPINFTSRLNRRASFPKYGGVDGGCFDRHLIFSRGSGSGSGSGSGSEVKLVESGGDLVKPGGSLKLSCAASGFTFSHYGMSWVRQTPDKRLEWVATIGSRGTYTHYPDSVKGRFTISRDNDKNALYLQMNSLRTEDTAMYYCARKSEFYYYGNTYYYSAMDYWGQGASVTVSSGGGGSGGGDSGGGGSDIVLTQSPASLAVSLGQRATISCRASESVDNYGFSFMNWFQQKPGQPPKLLIYATSNRGSGVPARFSGSGSGTDFSLNIHPVEEDDSAMYFCQQTKEVPWTFGGGTKLEIKR

SEQ ID NO: 90 - protein, 316 aa, synthetic construct
  source 1..316: note = HA-NLS-DCAF1-(GS)1-3DX.1 peptide
MYPYDVPDYAPAAKRVKLDGSGSGSQAPINFTSRLNRRASFPKYGGVDGGCFDRHLIFSRGSEVKLVESGGDLVKPGGSLKLSCAASGFTFSHYGMSWVRQTPDKRLEWVATIGSRGTYTHYPDSVKGRFTISRDNDKNALYLQMNSLRTEDTAMYYCARKSEFYYYGNTYYYSAMDYWGQGASVTVSSGGGGSGGGDSGGGGSDIVLTQSPASLAVSLGQRATISCRASESVDNYGFSFMNWFQQKPGQPPKLLIYATSNRGSGVPARFSGSGSGTDFSLNIHPVEEDDSAMYFCQQTKEVPWTFGGGTKLEIKR

SEQ ID NO: 91 - protein, 318 aa, synthetic construct
  source 1..318: note = HA-NLS-DCAF1-(GS)2-3DX.1 peptide
MYPYDVPDYAPAAKRVKLDGSGSGSQAPINFTSRLNRRASFPKYGGVDGGCFDRHLIFSRGSGSEVKLVESGGDLVKPGGSLKLSCAASGFTFSHYGMSWVRQTPDKRLEWVATIGSRGTYTHYPDSVKGRFTISRDNDKNALYLQMNSLRTEDTAMYYCARKSEFYYYGNTYYYSAMDYWGQGASVTVSSGGGGSGGGDSGGGGSDIVLTQSPASLAVSLGQRATISCRASESVDNYGFSFMNWFQQKPGQPPKLLIYATSNRGSGVPARFSGSGSGTDFSLNIHPVEEDDSAMYFCQQTKEVPWTFGGGTKLEIKR

SEQ ID NO: 92 - protein, 320 aa, synthetic construct
  source 1..320: note = HA-NLS-DCAF1-(GS)3-3DX.1 peptide
MYPYDVPDYAPAAKRVKLDGSGSGSQAPINFTSRLNRRASFPKYGGVDGGCFDRHLIFSRGSGSGSEVKLVESGGDLVKPGGSLKLSCAASGFTFSHYGMSWVRQTPDKRLEWVATIGSRGTYTHYPDSVKGRFTISRDNDKNALYLQMNSLRTEDTAMYYCARKSEFYYYGNTYYYSAMDYWGQGASVTVSSGGGGSGGGDSGGGGSDIVLTQSPASLAVSLGQRATISCRASESVDNYGFSFMNWFQQKPGQPPKLLIYATSNRGSGVPARFSGSGSGTDFSLNIHPVEEDDSAMYFCQQTKEVPWTFGGGTKLEIKR

SEQ ID NO: 93 - protein, 322 aa, synthetic construct
  source 1..322: note = HA-NLS-DCAF1-(GS)4-3DX.1 peptide
MYPYDVPDYAPAAKRVKLDGSGSGSQAPINFTSRLNRRASFPKYGGVDGGCFDRHLIFSRGSGSGSGSEVKLVESGGDLVKPGGSLKLSCAASGFTFSHYGMSWVRQTPDKRLEWVATIGSRGTYTHYPDSVKGRFTISRDNDKNALYLQMNSLRTEDTAMYYCARKSEFYYYGNTYYYSAMDYWGQGASVTVSSGGGGSGGGDSGGGGSDIVLTQSPASLAVSLGQRATISCRASESVDNYGFSFMNWFQQKPGQPPKLLIYATSNRGSGVPARFSGSGSGTDFSLNIHPVEEDDSAMYFCQQTKEVPWTFGGGTKLEIKR

SEQ ID NO: 94 - protein, 324 aa, synthetic construct
  source 1..324: note = HA-NLS-DCAF1-(GS)5-3DX.1 peptide
MYPYDVPDYAPAAKRVKLDGSGSGSQAPINFTSRLNRRASFPKYGGVDGGCFDRHLIFSRGSGSGSGSGSEVKLVESGGDLVKPGGSLKLSCAASGFTFSHYGMSWVRQTPDKRLEWVATIGSRGTYTHYPDSVKGRFTISRDNDKNALYLQMNSLRTEDTAMYYCARKSEFYYYGNTYYYSAMDYWGQGASVTVSSGGGGSGGGDSGGGGSDIVLTQSPASLAVSLGQRATISCRASESVDNYGFSFMNWFQQKPGQPPKLLIYATSNRGSGVPARFSGSGSGTDFSLNIHPVEEDDSAMYFCQQTKEVPWTFGGGTKLEIKR

SEQ ID NO: 95 - protein, 326 aa, synthetic construct
  source 1..326: note = HA-NLS-DCAF1-(GS)6-3DX.1 peptide
MYPYDVPDYAPAAKRVKLDGSGSGSQAPINFTSRLNRRASFPKYGGVDGGCFDRHLIFSRGSGSGSGSGSGSEVKLVESGGDLVKPGGSLKLSCAASGFTFSHYGMSWVRQTPDKRLEWVATIGSRGTYTHYPDSVKGRFTISRDNDKNALYLQMNSLRTEDTAMYYCARKSEFYYYGNTYYYSAMDYWGQGASVTVSSGGGGSGGGDSGGGGSDIVLTQSPASLAVSLGQRATISCRASESVDNYGFSFMNWFQQKPGQPPKLLIYATSNRGSGVPARFSGSGSGTDFSLNIHPVEEDDSAMYFCQQTKEVPWTFGGGTKLEIKR

SEQ ID NO: 96 - protein, 627 aa, synthetic construct
  source 1..627: note = NLS-3DX.1-(GS)1-E6AP peptide
PAAKRVKLDGSGSGSEVKLVESGGDLVKPGGSLKLSCAASGFTFSHYGMSWVRQTPDKRLEWVATIGSRGTYTHYPDSVKGRFTISRDNDKNALYLQMNSLRTEDTAMYYCARKSEFYYYGNTYYYSAMDYWGQGASVTVSSGGGGSGGGDSGGGGSDIVLTQSPASLAVSLGQRATISCRASESVDNYGFSFMNWFQQKPGQPPKLLIYATSNRGSGVPARFSGSGSGTDFSLNIHPVEEDDSAMYFCQQTKEVPWTFGGGTKLEIKRGSNPYLRLKVRRDHIIDDALVRLEMIAMENPADLKKQLYVEFEGEQGVDEGGVSKEFFQLVVEEIFNPDIGMFTYDESTKLFWFNPSSFETEGQFTLIGIVLGLAIYNNCILDVHFPMVVYRKLMGKKGTFRDLGDSHPVLYQSLKDLLEYEGNVEDDMMITFQISQTDLFGNPMMYDLKENGDKIPITNENRKEFVNLYSDYILNKSVEKQFKAFRRGFHMVTNESPLKYLFRPEEIELLICGSRNLDFQALEETTEYDGGYTRDSVLIREFWEIVHSFTDEQKRLFLQFTTGTDRAPVGGLGKLKMIIAKNGPDTERLPTSHTCFNVLLLPEYSSKEKLKERLLKAITYAKGFGML

SEQ ID NO: 97 - protein, 629 aa, synthetic construct
  source 1..629: note = NLS-3DX.1-(GS)2-E6AP peptide
PAAKRVKLDGSGSGSEVKLVESGGDLVKPGGSLKLSCAASGFTFSHYGMSWVRQTPDKRLEWVATIGSRGTYTHYPDSVKGRFTISRDNDKNALYLQMNSLRTEDTAMYYCARKSEFYYYGNTYYYSAMDYWGQGASVTVSSGGGGSGGGDSGGGGSDIVLTQSPASLAVSLGQRATISCRASESVDNYGFSFMNWFQQKPGQPPKLLIYATSNRGSGVPARFSGSGSGTDFSLNIHPVEEDDSAMYFCQQTKEVPWTFGGGTKLEIKRGSGSNPYLRLKVRRDHIIDDALVRLEMIAMENPADLKKQLYVEFEGEQGVDEGGVSKEFFQLVVEEIFNPDIGMFTYDESTKLFWFNPSSFETEGQFTLIGIVLGLAIYNNCILDVHFPMVVYRKLMGKKGTFRDLGDSHPVLYQSLKDLLEYEGNVEDDMMITFQISQTDLFGNPMMYDLKENGDKIPITNENRKEFVNLYSDYILNKSVEKQFKAFRRGFHMVTNESPLKYLFRPEEIELLICGSRNLDFQALEETTEYDGGYTRDSVLIREFWEIVHSFTDEQKRLFLQFTTGTDRAPVGGLGKLKMIIAKNGPDTERLPTSHTCFNVLLLPEYSSKEKLKERLLKAITYAKGFGML

SEQ ID NO: 98 - protein, 631 aa, synthetic construct
  source 1..631: note = NLS-3DX.1-(GS)3-E6AP peptide
PAAKRVKLDGSGSGSEVKLVESGGDLVKPGGSLKLSCAASGFTFSHYGMSWVRQTPDKRLEWVATIGSRGTYTHYPDSVKGRFTISRDNDKNALYLQMNSLRTEDTAMYYCARKSEFYYYGNTYYYSAMDYWGQGASVTVSSGGGGSGGGDSGGGGSDIVLTQSPASLAVSLGQRATISCRASESVDNYGFSFMNWFQQKPGQPPKLLIYATSNRGSGVPARFSGSGSGTDFSLNIHPVEEDDSAMYFCQQTKEVPWTFGGGTKLEIKRGSGSGSNPYLRLKVRRDHIIDDALVRLEMIAMENPADLKKQLYVEFEGEQGVDEGGVSKEFFQLVVEEIFNPDIGMFTYDESTKLFWFNPSSFETEGQFTLIGIVLGLAIYNNCILDVHFPMVVYRKLMGKKGTFRDLGDSHPVLYQSLKDLLEYEGNVEDDMMITFQISQTDLFGNPMMYDLKENGDKIPITNENRKEFVNLYSDYILNKSVEKQFKAFRRGFHMVTNESPLKYLFRPEEIELLICGSRNLDFQALEETTEYDGGYTRDSVLIREFWEIVHSFTDEQKRLFLQFTTGTDRAPVGGLGKLKMIIAKNGPDTERLPTSHTCFNVLLLPEYSSKEKLKERLLKAITYAKGFGML

SEQ ID NO: 99 - protein, 633 aa, synthetic construct
  source 1..633: note = NLS-3DX.1-(GS)4-E6AP peptide
PAAKRVKLDGSGSGSEVKLVESGGDLVKPGGSLKLSCAASGFTFSHYGMSWVRQTPDKRLEWVATIGSRGTYTHYPDSVKGRFTISRDNDKNALYLQMNSLRTEDTAMYYCARKSEFYYYGNTYYYSAMDYWGQGASVTVSSGGGGSGGGDSGGGGSDIVLTQSPASLAVSLGQRATISCRASESVDNYGFSFMNWFQQKPGQPPKLLIYATSNRGSGVPARFSGSGSGTDFSLNIHPVEEDDSAMYFCQQTKEVPWTFGGGTKLEIKRGSGSGSGSNPYLRLKVRRDHIIDDALVRLEMIAMENPADLKKQLYVEFEGEQGVDEGGVSKEFFQLVVEEIFNPDIGMFTYDESTKLFWFNPSSFETEGQFTLIGIVLGLAIYNNCILDVHFPMVVYRKLMGKKGTFRDLGDSHPVLYQSLKDLLEYEGNVEDDMMITFQISQTDLFGNPMMYDLKENGDKIPITNENRKEFVNLYSDYILNKSVEKQFKAFRRGFHMVTNESPLKYLFRPEEIELLICGSRNLDFQALEETTEYDGGYTRDSVLIREFWEIVHSFTDEQKRLFLQFTTGTDRAPVGGLGKLKMIIAKNGPDTERLPTSHTCFNVLLLPEYSSKEKLKERLLKAITYAKGFGML

SEQ ID NO: 100 - protein, 635 aa, synthetic construct
  source 1..635: note = NLS-3DX.1-(GS)5-E6AP peptide
PAAKRVKLDGSGSGSEVKLVESGGDLVKPGGSLKLSCAASGFTFSHYGMSWVRQTPDKRLEWVATIGSRGTYTHYPDSVKGRFTISRDNDKNALYLQMNSLRTEDTAMYYCARKSEFYYYGNTYYYSAMDYWGQGASVTVSSGGGGSGGGDSGGGGSDIVLTQSPASLAVSLGQRATISCRASESVDNYGFSFMNWFQQKPGQPPKLLIYATSNRGSGVPARFSGSGSGTDFSLNIHPVEEDDSAMYFCQQTKEVPWTFGGGTKLEIKRGSGSGSGSGSNPYLRLKVRRDHIIDDALVRLEMIAMENPADLKKQLYVEFEGEQGVDEGGVSKEFFQLVVEEIFNPDIGMFTYDESTKLFWFNPSSFETEGQFTLIGIVLGLAIYNNCILDVHFPMVVYRKLMGKKGTFRDLGDSHPVLYQSLKDLLEYEGNVEDDMMITFQISQTDLFGNPMMYDLKENGDKIPITNENRKEFVNLYSDYILNKSVEKQFKAFRRGFHMVTNESPLKYLFRPEEIELLICGSRNLDFQALEETTEYDGGYTRDSVLIREFWEIVHSFTDEQKRLFLQFTTGTDRAPVGGLGKLKMIIAKNGPDTERLPTSHTCFNVLLLPEYSSKEKLKERLLKAITYAKGFGML

SEQ ID NO: 101 - protein, 637 aa, synthetic construct
  source 1..637: note = NLS-3DX.1-(GS)6-E6AP peptide
PAAKRVKLDGSGSGSEVKLVESGGDLVKPGGSLKLSCAASGFTFSHYGMSWVRQTPDKRLEWVATIGSRGTYTHYPDSVKGRFTISRDNDKNALYLQMNSLRTEDTAMYYCARKSEFYYYGNTYYYSAMDYWGQGASVTVSSGGGGSGGGDSGGGGSDIVLTQSPASLAVSLGQRATISCRASESVDNYGFSFMNWFQQKPGQPPKLLIYATSNRGSGVPARFSGSGSGTDFSLNIHPVEEDDSAMYFCQQTKEVPWTFGGGTKLEIKRGSGSGSGSGSGSNPYLRLKVRRDHIIDDALVRLEMIAMENPADLKKQLYVEFEGEQGVDEGGVSKEFFQLVVEEIFNPDIGMFTYDESTKLFWFNPSSFETEGQFTLIGIVLGLAIYNNCILDVHFPMVVYRKLMGKKGTFRDLGDSHPVLYQSLKDLLEYEGNVEDDMMITFQISQTDLFGNPMMYDLKENGDKIPITNENRKEFVNLYSDYILNKSVEKQFKAFRRGFHMVTNESPLKYLFRPEEIELLICGSRNLDFQALEETTEYDGGYTRDSVLIREFWEIVHSFTDEQKRLFLQFTTGTDRAPVGGLGKLKMIIAKNGPDTERLPTSHTCFNVLLLPEYSSKEKLKERLLKAITYAKGFGML

SEQ ID NO: 102 - protein, 637 aa, synthetic construct
  source 1..637: note = HA-NLS-3DX.1-(GS)1-E6AP peptide
MYPYDVPDYAPAAKRVKLDGSGSGSEVKLVESGGDLVKPGGSLKLSCAASGFTFSHYGMSWVRQTPDKRLEWVATIGSRGTYTHYPDSVKGRFTISRDNDKNALYLQMNSLRTEDTAMYYCARKSEFYYYGNTYYYSAMDYWGQGASVTVSSGGGGSGGGDSGGGGSDIVLTQSPASLAVSLGQRATISCRASESVDNYGFSFMNWFQQKPGQPPKLLIYATSNRGSGVPARFSGSGSGTDFSLNIHPVEEDDSAMYFCQQTKEVPWTFGGGTKLEIKRGSNPYLRLKVRRDHIIDDALVRLEMIAMENPADLKKQLYVEFEGEQGVDEGGVSKEFFQLVVEEIFNPDIGMFTYDESTKLFWFNPSSFETEGQFTLIGIVLGLAIYNNCILDVHFPMVVYRKLMGKKGTFRDLGDSHPVLYQSLKDLLEYEGNVEDDMMITFQISQTDLFGNPMMYDLKENGDKIPITNENRKEFVNLYSDYILNKSVEKQFKAFRRGFHMVTNESPLKYLFRPEEIELLICGSRNLDFQALEETTEYDGGYTRDSVLIREFWEIVHSFTDEQKRLFLQFTTGTDRAPVGGLGKLKMIIAKNGPDTERLPTSHTCFNVLLLPEYSSKEKLKERLLKAITYAKGFGML

SEQ ID NO: 103 - protein, 639 aa, synthetic construct
  source 1..639: note = HA-NLS-3DX.1-(GS)2-E6AP peptide
MYPYDVPDYAPAAKRVKLDGSGSGSEVKLVESGGDLVKPGGSLKLSCAASGFTFSHYGMSWVRQTPDKRLEWVATIGSRGTYTHYPDSVKGRFTISRDNDKNALYLQMNSLRTEDTAMYYCARKSEFYYYGNTYYYSAMDYWGQGASVTVSSGGGGSGGGDSGGGGSDIVLTQSPASLAVSLGQRATISCRASESVDNYGFSFMNWFQQKPGQPPKLLIYATSNRGSGVPARFSGSGSGTDFSLNIHPVEEDDSAMYFCQQTKEVPWTFGGGTKLEIKRGSGSNPYLRLKVRRDHIIDDALVRLEMIAMENPADLKKQLYVEFEGEQGVDEGGVSKEFFQLVVEEIFNPDIGMFTYDESTKLFWFNPSSFETEGQFTLIGIVLGLAIYNNCILDVHFPMVVYRKLMGKKGTFRDLGDSHPVLYQSLKDLLEYEGNVEDDMMITFQISQTDLFGNPMMYDLKENGDKIPITNENRKEFVNLYSDYILNKSVEKQFKAFRRGFHMVTNESPLKYLFRPEEIELLICGSRNLDFQALEETTEYDGGYTRDSVLIREFWEIVHSFTDEQKRLFLQFTTGTDRAPVGGLGKLKMIIAKNGPDTERLPTSHTCFNVLLLPEYSSKEKLKERLLKAITYAKGFGML

SEQ ID NO: 104 - protein, 641 aa, synthetic construct
  source 1..641: note = HA-NLS-3DX.1-(GS)3-E6AP peptide
MYPYDVPDYAPAAKRVKLDGSGSGSEVKLVESGGDLVKPGGSLKLSCAASGFTFSHYGMSWVRQTPDKRLEWVATIGSRGTYTHYPDSVKGRFTISRDNDKNALYLQMNSLRTEDTAMYYCARKSEFYYYGNTYYYSAMDYWGQGASVTVSSGGGGSGGGDSGGGGSDIVLTQSPASLAVSLGQRATISCRASESVDNYGFSFMNWFQQKPGQPPKLLIYATSNRGSGVPARFSGSGSGTDFSLNIHPVEEDDSAMYFCQQTKEVPWTFGGGTKLEIKRGSGSGSNPYLRLKVRRDHIIDDALVRLEMIAMENPADLKKQLYVEFEGEQGVDEGGVSKEFFQLVVEEIFNPDIGMFTYDESTKLFWFNPSSFETEGQFTLIGIVLGLAIYNNCILDVHFPMVVYRKLMGKKGTFRDLGDSHPVLYQSLKDLLEYEGNVEDDMMITFQISQTDLFGNPMMYDLKENGDKIPITNENRKEFVNLYSDYILNKSVEKQFKAFRRGFHMVTNESPLKYLFRPEEIELLICGSRNLDFQALEETTEYDGGYTRDSVLIREFWEIVHSFTDEQKRLFLQFTTGTDRAPVGGLGKLKMIIAKNGPDTERLPTSHTCFNVLLLPEYSSKEKLKERLLKAITYAKGFGML

SEQ ID NO: 105 - protein, 643 aa, synthetic construct
  source 1..643: note = HA-NLS-3DX.1-(GS)4-E6AP peptide
MYPYDVPDYAPAAKRVKLDGSGSGSEVKLVESGGDLVKPGGSLKLSCAASGFTFSHYGMSWVRQTPDKRLEWVATIGSRGTYTHYPDSVKGRFTISRDNDKNALYLQMNSLRTEDTAMYYCARKSEFYYYGNTYYYSAMDYWGQGASVTVSSGGGGSGGGDSGGGGSDIVLTQSPASLAVSLGQRATISCRASESVDNYGFSFMNWFQQKPGQPPKLLIYATSNRGSGVPARFSGSGSGTDFSLNIHPVEEDDSAMYFCQQTKEVPWTFGGGTKLEIKRGSGSGSGSNPYLRLKVRRDHIIDDALVRLEMIAMENPADLKKQLYVEFEGEQGVDEGGVSKEFFQLVVEEIFNPDIGMFTYDESTKLFWFNPSSFETEGQFTLIGIVLGLAIYNNCILDVHFPMVVYRKLMGKKGTFRDLGDSHPVLYQSLKDLLEYEGNVEDDMMITFQISQTDLFGNPMMYDLKENGDKIPITNENRKEFVNLYSDYILNKSVEKQFKAFRRGFHMVTNESPLKYLFRPEEIELLICGSRNLDFQALEETTEYDGGYTRDSVLIREFWEIVHSFTDEQKRLFLQFTTGTDRAPVGGLGKLKMIIAKNGPDTERLPTSHTCFNVLLLPEYSSKEKLKERLLKAITYAKGFGML

SEQ ID NO: 106 - protein, 645 aa, synthetic construct
  source 1..645: note = HA-NLS-3DX.1-(GS)5-E6AP peptide
MYPYDVPDYAPAAKRVKLDGSGSGSEVKLVESGGDLVKPGGSLKLSCAASGFTFSHYGMSWVRQTPDKRLEWVATIGSRGTYTHYPDSVKGRFTISRDNDKNALYLQMNSLRTEDTAMYYCARKSEFYYYGNTYYYSAMDYWGQGASVTVSSGGGGSGGGDSGGGGSDIVLTQSPASLAVSLGQRATISCRASESVDNYGFSFMNWFQQKPGQPPKLLIYATSNRGSGVPARFSGSGSGTDFSLNIHPVEEDDSAMYFCQQTKEVPWTFGGGTKLEIKRGSGSGSGSGSNPYLRLKVRRDHIIDDALVRLEMIAMENPADLKKQLYVEFEGEQGVDEGGVSKEFFQLVVEEIFNPDIGMFTYDESTKLFWFNPSSFETEGQFTLIGIVLGLAIYNNCILDVHFPMVVYRKLMGKKGTFRDLGDSHPVLYQSLKDLLEYEGNVEDDMMITFQISQTDLFGNPMMYDLKENGDKIPITNENRKEFVNLYSDYILNKSVEKQFKAFRRGFHMVTNESPLKYLFRPEEIELLICGSRNLDFQALEETTEYDGGYTRDSVLIREFWEIVHSFTDEQKRLFLQFTTGTDRAPVGGLGKLKMIIAKNGPDTERLPTSHTCFNVLLLPEYSSKEKLKERLLKAITYAKGFGML

SEQ ID NO: 107 - protein, 647 aa, synthetic construct
  source 1..647: note = HA-NLS-3DX.1-(GS)6-E6AP peptide
MYPYDVPDYAPAAKRVKLDGSGSGSEVKLVESGGDLVKPGGSLKLSCAASGFTFSHYGMSWVRQTPDKRLEWVATIGSRGTYTHYPDSVKGRFTISRDNDKNALYLQMNSLRTEDTAMYYCARKSEFYYYGNTYYYSAMDYWGQGASVTVSSGGGGSGGGDSGGGGSDIVLTQSPASLAVSLGQRATISCRASESVDNYGFSFMNWFQQKPGQPPKLLIYATSNRGSGVPARFSGSGSGTDFSLNIHPVEEDDSAMYFCQQTKEVPWTFGGGTKLEIKRGSGSGSGSGSGSNPYLRLKVRRDHIIDDALVRLEMIAMENPADLKKQLYVEFEGEQGVDEGGVSKEFFQLVVEEIFNPDIGMFTYDESTKLFWFNPSSFETEGQFTLIGIVLGLAIYNNCILDVHFPMVVYRKLMGKKGTFRDLGDSHPVLYQSLKDLLEYEGNVEDDMMITFQISQTDLFGNPMMYDLKENGDKIPITNENRKEFVNLYSDYILNKSVEKQFKAFRRGFHMVTNESPLKYLFRPEEIELLICGSRNLDFQALEETTEYDGGYTRDSVLIREFWEIVHSFTDEQKRLFLQFTTGTDRAPVGGLGKLKMIIAKNGPDTERLPTSHTCFNVLLLPEYSSKEKLKERLLKAITYAKGFGML

SEQ ID NO: 108 - protein, 623 aa, synthetic construct
  source 1..623: note = FBXW7a-(GS)1-3DX.1 peptide
NQELLSVGSKRRRTGGSLRGNPSSSQVDEEQMNRVVEEEQQQQLRQQEEEHTARNGEVVGVEPRPGGQNDSQQGQLEENNNRFISVDEDSSGNQEEQEEDEEHAGEQDEEDEEEEEMDQESDDFDQSDDSSREDEHTHTNSVTNSSSIVDLPVHQLSSPFYTKTTKMKRKLDHGSEVRSFSLGKKPCKVSEYTSTTGLVPCSATPTTFGDLRAANGQGQQRRRITSVQPPTGLQEWLKMFQSWSGPEKLLALDELIDSCEPTQVKHMMQVIEPQFQRDFISLLPKELALYVLSFLEPKDLLQAAQTCRYWRILAEDNLLWREKCKEEGIDEPLHIKRRKVIKPGFIHSPWKSAYIRQHRIDTNSRRGGSEVKLVESGGDLVKPGGSLKLSCAASGFTFSHYGMSWVRQTPDKRLEWVATIGSRGTYTHYPDSVKGRFTISRDNDKNALYLQMNSLRTEDTAMYYCARKSEFYYYGNTYYYSAMDYWGQGASVTVSSGGGGSGGGDSGGGGSDIVLTQSPASLAVSLGQRATISCRASESVDNYGFSFMNWFQQKPGQPPKLLIYATSNRGSGVPARFSGSGSGTDFSLNIHPVEEDDSAMYFCQQTKEVPWTFGGGTKLEIKR

SEQ ID NO: 109 - protein, 625 aa, synthetic construct
  source 1..625: note = FBXW7a-(GS)2-3DX.1 peptide
NQELLSVGSKRRRTGGSLRGNPSSSQVDEEQMNRVVEEEQQQQLRQQEEEHTARNGEVVGVEPRPGGQNDSQQGQLEENNNRFISVDEDSSGNQEEQEEDEEHAGEQDEEDEEEEEMDQESDDFDQSDDSSREDEHTHTNSVTNSSSIVDLPVHQLSSPFYTKTTKMKRKLDHGSEVRSFSLGKKPCKVSEYTSTTGLVPCSATPTTFGDLRAANGQGQQRRRITSVQPPTGLQEWLKMFQSWSGPEKLLALDELIDSCEPTQVKHMMQVIEPQFQRDFISLLPKELALYVLSFLEPKDLLQAAQTCRYWRILAEDNLLWREKCKEEGIDEPLHIKRRKVIKPGFIHSPWKSAYIRQHRIDTNSRRGGSGSEVKLVESGGDLVKPGGSLKLSCAASGFTFSHYGMSWVRQTPDKRLEWVATIGSRGTYTHYPDSVKGRFTISRDNDKNALYLQMNSLRTEDTAMYYCARKSEFYYYGNTYYYSAMDYWGQGASVTVSSGGGGSGGGDSGGGGSDIVLTQSPASLAVSLGQRATISCRASESVDNYGFSFMNWFQQKPGQPPKLLIYATSNRGSGVPARFSGSGSGTDFSLNIHPVEEDDSAMYFCQQTKEVPWTFGGGTKLEIKR

SEQ ID NO: 110 - protein, 627 aa, synthetic construct
  source 1..627: note = FBXW7a-(GS)3-3DX.1 peptide
NQELLSVGSKRRRTGGSLRGNPSSSQVDEEQMNRVVEEEQQQQLRQQEEEHTARNGEVVGVEPRPGGQNDSQQGQLEENNNRFISVDEDSSGNQEEQEEDEEHAGEQDEEDEEEEEMDQESDDFDQSDDSSREDEHTHTNSVTNSSSIVDLPVHQLSSPFYTKTTKMKRKLDHGSEVRSFSLGKKPCKVSEYTSTTGLVPCSATPTTFGDLRAANGQGQQRRRITSVQPPTGLQEWLKMFQSWSGPEKLLALDELIDSCEPTQVKHMMQVIEPQFQRDFISLLPKELALYVLSFLEPKDLLQAAQTCRYWRILAEDNLLWREKCKEEGIDEPLHIKRRKVIKPGFIHSPWKSAYIRQHRIDTNSRRGGSGSGSEVKLVESGGDLVKPGGSLKLSCAASGFTFSHYGMSWVRQTPDKRLEWVATIGSRGTYTHYPDSVKGRFTISRDNDKNALYLQMNSLRTEDTAMYYCARKSEFYYYGNTYYYSAMDYWGQGASVTVSSGGGGSGGGDSGGGGSDIVLTQSPASLAVSLGQRATISCRASESVDNYGFSFMNWFQQKPGQPPKLLIYATSNRGSGVPARFSGSGSGTDFSLNIHPVEEDDSAMYFCQQTKEVPWTFGGGTKLEIKR

SEQ ID NO: 111 - protein, 629 aa, synthetic construct
  source 1..629: note = FBXW7a-(GS)4-3DX.1 peptide
NQELLSVGSKRRRTGGSLRGNPSSSQVDEEQMNRVVEEEQQQQLRQQEEEHTARNGEVVGVEPRPGGQNDSQQGQLEENNNRFISVDEDSSGNQEEQEEDEEHAGEQDEEDEEEEEMDQESDDFDQSDDSSREDEHTHTNSVTNSSSIVDLPVHQLSSPFYTKTTKMKRKLDHGSEVRSFSLGKKPCKVSEYTSTTGLVPCSATPTTFGDLRAANGQGQQRRRITSVQPPTGLQEWLKMFQSWSGPEKLLALDELIDSCEPTQVKHMMQVIEPQFQRDFISLLPKELALYVLSFLEPKDLLQAAQTCRYWRILAEDNLLWREKCKEEGIDEPLHIKRRKVIKPGFIHSPWKSAYIRQHRIDTNSRRGGSGSGSGSEVKLVESGGDLVKPGGSLKLSCAASGFTFSHYGMSWVRQTPDKRLEWVATIGSRGTYTHYPDSVKGRFTISRDNDKNALYLQMNSLRTEDTAMYYCARKSEFYYYGNTYYYSAMDYWGQGASVTVSSGGGGSGGGDSGGGGSDIVLTQSPASLAVSLGQRATISCRASESVDNYGFSFMNWFQQKPGQPPKLLIYATSNRGSGVPARFSGSGSGTDFSLNIHPVEEDDSAMYFCQQTKEVPWTFGGGTKLEIKR

SEQ ID NO: 112 - protein, 631 aa, synthetic construct
  source 1..631: note = FBXW7a-(GS)5-3DX.1 peptide
NQELLSVGSKRRRTGGSLRGNPSSSQVDEEQMNRVVEEEQQQQLRQQEEEHTARNGEVVGVEPRPGGQNDSQQGQLEENNNRFISVDEDSSGNQEEQEEDEEHAGEQDEEDEEEEEMDQESDDFDQSDDSSREDEHTHTNSVTNSSSIVDLPVHQLSSPFYTKTTKMKRKLDHGSEVRSFSLGKKPCKVSEYTSTTGLVPCSATPTTFGDLRAANGQGQQRRRITSVQPPTGLQEWLKMFQSWSGPEKLLALDELIDSCEPTQVKHMMQVIEPQFQRDFISLLPKELALYVLSFLEPKDLLQAAQTCRYWRILAEDNLLWREKCKEEGIDEPLHIKRRKVIKPGFIHSPWKSAYIRQHRIDTNSRRGGSGSGSGSGSEVKLVESGGDLVKPGGSLKLSCAASGFTFSHYGMSWVRQTPDKRLEWVATIGSRGTYTHYPDSVKGRFTISRDNDKNALYLQMNSLRTEDTAMYYCARKSEFYYYGNTYYYSAMDYWGQGASVTVSSGGGGSGGGDSGGGGSDIVLTQSPASLAVSLGQRATISCRASESVDNYGFSFMNWFQQKPGQPPKLLIYATSNRGSGVPARFSGSGSGTDFSLNIHPVEEDDSAMYFCQQTKEVPWTFGGGTKLEIKR

SEQ ID NO: 113 - protein, 633 aa, synthetic construct
  source 1..633: note = FBXW7a-(GS)6-3DX.1 peptide
NQELLSVGSKRRRTGGSLRGNPSSSQVDEEQMNRVVEEEQQQQLRQQEEEHTARNGEVVGVEPRPGGQNDSQQGQLEENNNRFISVDEDSSGNQEEQEEDEEHAGEQDEEDEEEEEMDQESDDFDQSDDSSREDEHTHTNSVTNSSSIVDLPVHQLSSPFYTKTTKMKRKLDHGSEVRSFSLGKKPCKVSEYTSTTGLVPCSATPTTFGDLRAANGQGQQRRRITSVQPPTGLQEWLKMFQSWSGPEKLLALDELIDSCEPTQVKHMMQVIEPQFQRDFISLLPKELALYVLSFLEPKDLLQAAQTCRYWRILAEDNLLWREKCKEEGIDEPLHIKRRKVIKPGFIHSPWKSAYIRQHRIDTNSRRGGSGSGSGSGSGSEVKLVESGGDLVKPGGSLKLSCAASGFTFSHYGMSWVRQTPDKRLEWVATIGSRGTYTHYPDSVKGRFTISRDNDKNALYLQMNSLRTEDTAMYYCARKSEFYYYGNTYYYSAMDYWGQGASVTVSSGGGGSGGGDSGGGGSDIVLTQSPASLAVSLGQRATISCRASESVDNYGFSFMNWFQQKPGQPPKLLIYATSNRGSGVPARFSGSGSGTDFSLNIHPVEEDDSAMYFCQQTKEVPWTFGGGTKLEIKR

SEQ ID NO: 114 - protein, 633 aa, synthetic construct
  source 1..633: note = HA-FBXW7a-(GS)1-3DX.1 peptide
MYPYDVPDYANQELLSVGSKRRRTGGSLRGNPSSSQVDEEQMNRVVEEEQQQQLRQQEEEHTARNGEVVGVEPRPGGQNDSQQGQLEENNNRFISVDEDSSGNQEEQEEDEEHAGEQDEEDEEEEEMDQESDDFDQSDDSSREDEHTHTNSVTNSSSIVDLPVHQLSSPFYTKTTKMKRKLDHGSEVRSFSLGKKPCKVSEYTSTTGLVPCSATPTTFGDLRAANGQGQQRRRITSVQPPTGLQEWLKMFQSWSGPEKLLALDELIDSCEPTQVKHMMQVIEPQFQRDFISLLPKELALYVLSFLEPKDLLQAAQTCRYWRILAEDNLLWREKCKEEGIDEPLHIKRRKVIKPGFIHSPWKSAYIRQHRIDTNSRRGGSEVKLVESGGDLVKPGGSLKLSCAASGFTFSHYGMSWVRQTPDKRLEWVATIGSRGTYTHYPDSVKGRFTISRDNDKNALYLQMNSLRTEDTAMYYCARKSEFYYYGNTYYYSAMDYWGQGASVTVSSGGGGSGGGDSGGGGSDIVLTQSPASLAVSLGQRATISCRASESVDNYGFSFMNWFQQKPGQPPKLLIYATSNRGSGVPARFSGSGSGTDFSLNIHPVEEDDSAMYFCQQTKEVPWTFGGGTKLEIKR

SEQ ID NO: 115 - protein, 635 aa, synthetic construct
  source 1..635: note = HA-FBXW7a-(GS)2-3DX.1 peptide
MYPYDVPDYANQELLSVGSKRRRTGGSLRGNPSSSQVDEEQMNRVVEEEQQQQLRQQEEEHTARNGEVVGVEPRPGGQNDSQQGQLEENNNRFISVDEDSSGNQEEQEEDEEHAGEQDEEDEEEEEMDQESDDFDQSDDSSREDEHTHTNSVTNSSSIVDLPVHQLSSPFYTKTTKMKRKLDHGSEVRSFSLGKKPCKVSEYTSTTGLVPCSATPTTFGDLRAANGQGQQRRRITSVQPPTGLQEWLKMFQSWSGPEKLLALDELIDSCEPTQVKHMMQVIEPQFQRDFISLLPKELALYVLSFLEPKDLLQAAQTCRYWRILAEDNLLWREKCKEEGIDEPLHIKRRKVIKPGFIHSPWKSAYIRQHRIDTNSRRGGSGSEVKLVESGGDLVKPGGSLKLSCAASGFTFSHYGMSWVRQTPDKRLEWVATIGSRGTYTHYPDSVKGRFTISRDNDKNALYLQMNSLRTEDTAMYYCARKSEFYYYGNTYYYSAMDYWGQGASVTVSSGGGGSGGGDSGGGGSDIVLTQSPASLAVSLGQRATISCRASESVDNYGFSFMNWFQQKPGQPPKLLIYATSNRGSGVPARFSGSGSGTDFSLNIHPVEEDDSAMYFCQQTKEVPWTFGGGTKLEIKR

SEQ ID NO: 116 - protein, 637 aa, synthetic construct
  source 1..637: note = HA-FBXW7a-(GS)3-3DX.1 peptide
MYPYDVPDYANQELLSVGSKRRRTGGSLRGNPSSSQVDEEQMNRVVEEEQQQQLRQQEEEHTARNGEVVGVEPRPGGQNDSQQGQLEENNNRFISVDEDSSGNQEEQEEDEEHAGEQDEEDEEEEEMDQESDDFDQSDDSSREDEHTHTNSVTNSSSIVDLPVHQLSSPFYTKTTKMKRKLDHGSEVRSFSLGKKPCKVSEYTSTTGLVPCSATPTTFGDLRAANGQGQQRRRITSVQPPTGLQEWLKMFQSWSGPEKLLALDELIDSCEPTQVKHMMQVIEPQFQRDFISLLPKELALYVLSFLEPKDLLQAAQTCRYWRILAEDNLLWREKCKEEGIDEPLHIKRRKVIKPGFIHSPWKSAYIRQHRIDTNSRRGGSGSGSEVKLVESGGDLVKPGGSLKLSCAASGFTFSHYGMSWVRQTPDKRLEWVATIGSRGTYTHYPDSVKGRFTISRDNDKNALYLQMNSLRTEDTAMYYCARKSEFYYYGNTYYYSAMDYWGQGASVTVSSGGGGSGGGDSGGGGSDIVLTQSPASLAVSLGQRATISCRASESVDNYGFSFMNWFQQKPGQPPKLLIYATSNRGSGVPARFSGSGSGTDFSLNIHPVEEDDSAMYFCQQTKEVPWTFGGGTKLEIKR

SEQ ID NO: 117 - protein, 639 aa, synthetic construct
  source 1..639: note = HA-FBXW7a-(GS)4-3DX.1 peptide
MYPYDVPDYANQELLSVGSKRRRTGGSLRGNPSSSQVDEEQMNRVVEEEQQQQLRQQEEEHTARNGEVVGVEPRPGGQNDSQQGQLEENNNRFISVDEDSSGNQEEQEEDEEHAGEQDEEDEEEEEMDQESDDFDQSDDSSREDEHTHTNSVTNSSSIVDLPVHQLSSPFYTKTTKMKRKLDHGSEVRSFSLGKKPCKVSEYTSTTGLVPCSATPTTFGDLRAANGQGQQRRRITSVQPPTGLQEWLKMFQSWSGPEKLLALDELIDSCEPTQVKHMMQVIEPQFQRDFISLLPKELALYVLSFLEPKDLLQAAQTCRYWRILAEDNLLWREKCKEEGIDEPLHIKRRKVIKPGFIHSPWKSAYIRQHRIDTNSRRGGSGSGSGSEVKLVESGGDLVKPGGSLKLSCAASGFTFSHYGMSWVRQTPDKRLEWVATIGSRGTYTHYPDSVKGRFTISRDNDKNALYLQMNSLRTEDTAMYYCARKSEFYYYGNTYYYSAMDYWGQGASVTVSSGGGGSGGGDSGGGGSDIVLTQSPASLAVSLGQRATISCRASESVDNYGFSFMNWFQQKPGQPPKLLIYATSNRGSGVPARFSGSGSGTDFSLNIHPVEEDDSAMYFCQQTKEVPWTFGGGTKLEIKR

SEQ ID NO: 118 - protein, 641 aa, synthetic construct
  source 1..641: note = HA-FBXW7a-(GS)5-3DX.1 peptide
MYPYDVPDYANQELLSVGSKRRRTGGSLRGNPSSSQVDEEQMNRVVEEEQQQQLRQQEEEHTARNGEVVGVEPRPGGQNDSQQGQLEENNNRFISVDEDSSGNQEEQEEDEEHAGEQDEEDEEEEEMDQESDDFDQSDDSSREDEHTHTNSVTNSSSIVDLPVHQLSSPFYTKTTKMKRKLDHGSEVRSFSLGKKPCKVSEYTSTTGLVPCSATPTTFGDLRAANGQGQQRRRITSVQPPTGLQEWLKMFQSWSGPEKLLALDELIDSCEPTQVKHMMQVIEPQFQRDFISLLPKELALYVLSFLEPKDLLQAAQTCRYWRILAEDNLLWREKCKEEGIDEPLHIKRRKVIKPGFIHSPWKSAYIRQHRIDTNSRRGGSGSGSGSGSEVKLVESGGDLVKPGGSLKLSCAASGFTFSHYGMSWVRQTPDKRLEWVATIGSRGTYTHYPDSVKGRFTISRDNDKNALYLQMNSLRTEDTAMYYCARKSEFYYYGNTYYYSAMDYWGQGASVTVSSGGGGSGGGDSGGGGSDIVLTQSPASLAVSLGQRATISCRASESVDNYGFSFMNWFQQKPGQPPKLLIYATSNRGSGVPARFSGSGSGTDFSLNIHPVEEDDSAMYFCQQTKEVPWTFGGGTKLEIKR

SEQ ID NO: 119 - protein, 643 aa, synthetic construct
  source 1..643: note = HA-FBXW7a-(GS)6-3DX.1 peptide
MYPYDVPDYANQELLSVGSKRRRTGGSLRGNPSSSQVDEEQMNRVVEEEQQQQLRQQEEEHTARNGEVVGVEPRPGGQNDSQQGQLEENNNRFISVDEDSSGNQEEQEEDEEHAGEQDEEDEEEEEMDQESDDFDQSDDSSREDEHTHTNSVTNSSSIVDLPVHQLSSPFYTKTTKMKRKLDHGSEVRSFSLGKKPCKVSEYTSTTGLVPCSATPTTFGDLRAANGQGQQRRRITSVQPPTGLQEWLKMFQSWSGPEKLLALDELIDSCEPTQVKHMMQVIEPQFQRDFISLLPKELALYVLSFLEPKDLLQAAQTCRYWRILAEDNLLWREKCKEEGIDEPLHIKRRKVIKPGFIHSPWKSAYIRQHRIDTNSRRGGSGSGSGSGSGSEVKLVESGGDLVKPGGSLKLSCAASGFTFSHYGMSWVRQTPDKRLEWVATIGSRGTYTHYPDSVKGRFTISRDNDKNALYLQMNSLRTEDTAMYYCARKSEFYYYGNTYYYSAMDYWGQGASVTVSSGGGGSGGGDSGGGGSDIVLTQSPASLAVSLGQRATISCRASESVDNYGFSFMNWFQQKPGQPPKLLIYATSNRGSGVPARFSGSGSGTDFSLNIHPVEEDDSAMYFCQQTKEVPWTFGGGTKLEIKR

SEQ ID NO: 120 - protein, 592 aa, synthetic construct
  source 1..592: note = NLS-Keap1-(GS)1-3DX.1 peptide
PAAKRVKLDGSGSGSQPDPRPSGAGACCRFLPLQSQCPEGAGDAVMYASTECKAEVTPSQHGNRTFSYTLEDHTKQAFGIMNELRLSQQLCDVTLQVKYQDAPAAQFMAHKVVLASSSPVFKAMFTNGLREQGMEVVSIEGIHPKVMERLIEFAYTASISMGEKCVLHVMNGAVMYQIDSVVRACSDFLVQQLDPSNAIGIANFAEQIGCVELHQRAREYIYMHFGEVAKQEEFFNLSHCQLVTLISRDDLNVRCESEVFHACINWVKYDCEQRRFYVQALLRAVRCHSLTPNFLQMQLQKCEILQSDSRCKDYLVKIFEELTLHKPTQVMPCRAPGSEVKLVESGGDLVKPGGSLKLSCAASGFTFSHYGMSWVRQTPDKRLEWVATIGSRGTYTHYPDSVKGRFTISRDNDKNALYLQMNSLRTEDTAMYYCARKSEFYYYGNTYYYSAMDYWGQGASVTVSSGGGGSGGGDSGGGGSDIVLTQSPASLAVSLGQRATISCRASESVDNYGFSFMNWFQQKPGQPPKLLIYATSNRGSGVPARFSGSGSGTDFSLNIHPVEEDDSAMYFCQQTKEVPWTFGGGTKLEIKR

SEQ ID NO: 121 - protein, 594 aa, synthetic construct
  source 1..594: note = NLS-Keap1-(GS)2-3DX.1 peptide
PAAKRVKLDGSGSGSQPDPRPSGAGACCRFLPLQSQCPEGAGDAVMYASTECKAEVTPSQHGNRTFSYTLEDHTKQAFGIMNELRLSQQLCDVTLQVKYQDAPAAQFMAHKVVLASSSPVFKAMFTNGLREQGMEVVSIEGIHPKVMERLIEFAYTASISMGEKCVLHVMNGAVMYQIDSVVRACSDFLVQQLDPSNAIGIANFAEQIGCVELHQRAREYIYMHFGEVAKQEEFFNLSHCQLVTLISRDDLNVRCESEVFHACINWVKYDCEQRRFYVQALLRAVRCHSLTPNFLQMQLQKCEILQSDSRCKDYLVKIFEELTLHKPTQVMPCRAPGSGSEVKLVESGGDLVKPGGSLKLSCAASGFTFSHYGMSWVRQTPDKRLEWVATIGSRGTYTHYPDSVKGRFTISRDNDKNALYLQMNSLRTEDTAMYYCARKSEFYYYGNTYYYSAMDYWGQGASVTVSSGGGGSGGGDSGGGGSDIVLTQSPASLAVSLGQRATISCRASESVDNYGFSFMNWFQQKPGQPPKLLIYATSNRGSGVPARFSGSGSGTDFSLNIHPVEEDDSAMYFCQQTKEVPWTFGGGTKLEIKR

SEQ ID NO: 122 - protein, 596 aa, synthetic construct
  source 1..596: note = NLS-Keap1-(GS)3-3DX.1 peptide
PAAKRVKLDGSGSGSQPDPRPSGAGACCRFLPLQSQCPEGAGDAVMYASTECKAEVTPSQHGNRTFSYTLEDHTKQAFGIMNELRLSQQLCDVTLQVKYQDAPAAQFMAHKVVLASSSPVFKAMFTNGLREQGMEVVSIEGIHPKVMERLIEFAYTASISMGEKCVLHVMNGAVMYQIDSVVRACSDFLVQQLDPSNAIGIANFAEQIGCVELHQRAREYIYMHFGEVAKQEEFFNLSHCQLVTLISRDDLNVRCESEVFHACINWVKYDCEQRRFYVQALLRAVRCHSLTPNFLQMQLQKCEILQSDSRCKDYLVKIFEELTLHKPTQVMPCRAPGSGSGSEVKLVESGGDLVKPGGSLKLSCAASGFTFSHYGMSWVRQTPDKRLEWVATIGSRGTYTHYPDSVKGRFTISRDNDKNALYLQMNSLRTEDTAMYYCARKSEFYYYGNTYYYSAMDYWGQGASVTVSSGGGGSGGGDSGGGGSDIVLTQSPASLAVSLGQRATISCRASESVDNYGFSFMNWFQQKPGQPPKLLIYATSNRGSGVPARFSGSGSGTDFSLNIHPVEEDDSAMYFCQQTKEVPWTFGGGTKLEIKR

SEQ ID NO: 123 - protein, 598 aa, synthetic construct
  source 1..598: note = NLS-Keap1-(GS)4-3DX.1 peptide
PAAKRVKLDGSGSGSQPDPRPSGAGACCRFLPLQSQCPEGAGDAVMYASTECKAEVTPSQHGNRTFSYTLEDHTKQAFGIMNELRLSQQLCDVTLQVKYQDAPAAQFMAHKVVLASSSPVFKAMFTNGLREQGMEVVSIEGIHPKVMERLIEFAYTASISMGEKCVLHVMNGAVMYQIDSVVRACSDFLVQQLDPSNAIGIANFAEQIGCVELHQRAREYIYMHFGEVAKQEEFFNLSHCQLVTLISRDDLNVRCESEVFHACINWVKYDCEQRRFYVQALLRAVRCHSLTPNFLQMQLQKCEILQSDSRCKDYLVKIFEELTLHKPTQVMPCRAPGSGSGSGSEVKLVESGGDLVKPGGSLKLSCAASGFTFSHYGMSWVRQTPDKRLEWVATIGSRGTYTHYPDSVKGRFTISRDNDKNALYLQMNSLRTEDTAMYYCARKSEFYYYGNTYYYSAMDYWGQGASVTVSSGGGGSGGGDSGGGGSDIVLTQSPASLAVSLGQRATISCRASESVDNYGFSFMNWFQQKPGQPPKLLIYATSNRGSGVPARFSGSGSGTDFSLNIHPVEEDDSAMYFCQQTKEVPWTFGGGTKLEIKR

SEQ ID NO: 124 - protein, 600 aa, synthetic construct
  source 1..600: note = NLS-Keap1-(GS)5-3DX.1 peptide
PAAKRVKLDGSGSGSQPDPRPSGAGACCRFLPLQSQCPEGAGDAVMYASTECKAEVTPSQHGNRTFSYTLEDHTKQAFGIMNELRLSQQLCDVTLQVKYQDAPAAQFMAHKVVLASSSPVFKAMFTNGLREQGMEVVSIEGIHPKVMERLIEFAYTASISMGEKCVLHVMNGAVMYQIDSVVRACSDFLVQQLDPSNAIGIANFAEQIGCVELHQRAREYIYMHFGEVAKQEEFFNLSHCQLVTLISRDDLNVRCESEVFHACINWVKYDCEQRRFYVQALLRAVRCHSLTPNFLQMQLQKCEILQSDSRCKDYLVKIFEELTLHKPTQVMPCRAPGSGSGSGSGSEVKLVESGGDLVKPGGSLKLSCAASGFTFSHYGMSWVRQTPDKRLEWVATIGSRGTYTHYPDSVKGRFTISRDNDKNALYLQMNSLRTEDTAMYYCARKSEFYYYGNTYYYSAMDYWGQGASVTVSSGGGGSGGGDSGGGGSDIVLTQSPASLAVSLGQRATISCRASESVDNYGFSFMNWFQQKPGQPPKLLIYATSNRGSGVPARFSGSGSGTDFSLNIHPVEEDDSAMYFCQQTKEVPWTFGGGTKLEIKR

SEQ ID NO: 125 - protein, 602 aa, synthetic construct
  source 1..602: note = NLS-Keap1-(GS)6-3DX.1 peptide
PAAKRVKLDGSGSGSQPDPRPSGAGACCRFLPLQSQCPEGAGDAVMYASTECKAEVTPSQHGNRTFSYTLEDHTKQAFGIMNELRLSQQLCDVTLQVKYQDAPAAQFMAHKVVLASSSPVFKAMFTNGLREQGMEVVSIEGIHPKVMERLIEFAYTASISMGEKCVLHVMNGAVMYQIDSVVRACSDFLVQQLDPSNAIGIANFAEQIGCVELHQRAREYIYMHFGEVAKQEEFFNLSHCQLVTLISRDDLNVRCESEVFHACINWVKYDCEQRRFYVQALLRAVRCHSLTPNFLQMQLQKCEILQSDSRCKDYLVKIFEELTLHKPTQVMPCRAPGSGSGSGSGSGSEVKLVESGGDLVKPGGSLKLSCAASGFTFSHYGMSWVRQTPDKRLEWVATIGSRGTYTHYPDSVKGRFTISRDNDKNALYLQMNSLRTEDTAMYYCARKSEFYYYGNTYYYSAMDYWGQGASVTVSSGGGGSGGGDSGGGGSDIVLTQSPASLAVSLGQRATISCRASESVDNYGFSFMNWFQQKPGQPPKLLIYATSNRGSGVPARFSGSGSGTDFSLNIHPVEEDDSAMYFCQQTKEVPWTFGGGTKLEIKR

SEQ ID NO: 126 - protein, 602 aa, synthetic construct
  source 1..602: note = HA-NLS-Keap1-(GS)1-3DX.1 peptide
MYPYDVPDYAPAAKRVKLDGSGSGSQPDPRPSGAGACCRFLPLQSQCPEGAGDAVMYASTECKAEVTPSQHGNRTFSYTLEDHTKQAFGIMNELRLSQQLCDVTLQVKYQDAPAAQFMAHKVVLASSSPVFKAMFTNGLREQGMEVVSIEGIHPKVMERLIEFAYTASISMGEKCVLHVMNGAVMYQIDSVVRACSDFLVQQLDPSNAIGIANFAEQIGCVELHQRAREYIYMHFGEVAKQEEFFNLSHCQLVTLISRDDLNVRCESEVFHACINWVKYDCEQRRFYVQALLRAVRCHSLTPNFLQMQLQKCEILQSDSRCKDYLVKIFEELTLHKPTQVMPCRAPGSEVKLVESGGDLVKPGGSLKLSCAASGFTFSHYGMSWVRQTPDKRLEWVATIGSRGTYTHYPDSVKGRFTISRDNDKNALYLQMNSLRTEDTAMYYCARKSEFYYYGNTYYYSAMDYWGQGASVTVSSGGGGSGGGDSGGGGSDIVLTQSPASLAVSLGQRATISCRASESVDNYGFSFMNWFQQKPGQPPKLLIYATSNRGSGVPARFSGSGSGTDFSLNIHPVEEDDSAMYFCQQTKEVPWTFGGGTKLEIKR

SEQ ID NO: 127 - protein, 604 aa, synthetic construct
  source 1..604: note = HA-NLS-Keap1-(GS)2-3DX.1 peptide
MYPYDVPDYAPAAKRVKLDGSGSGSQPDPRPSGAGACCRFLPLQSQCPEGAGDAVMYASTECKAEVTPSQHGNRTFSYTLEDHTKQAFGIMNELRLSQQLCDVTLQVKYQDAPAAQFMAHKVVLASSSPVFKAMFTNGLREQGMEVVSIEGIHPKVMERLIEFAYTASISMGEKCVLHVMNGAVMYQIDSVVRACSDFLVQQLDPSNAIGIANFAEQIGCVELHQRAREYIYMHFGEVAKQEEFFNLSHCQLVTLISRDDLNVRCESEVFHACINWVKYDCEQRRFYVQALLRAVRCHSLTPNFLQMQLQKCEILQSDSRCKDYLVKIFEELTLHKPTQVMPCRAPGSGSEVKLVESGGDLVKPGGSLKLSCAASGFTFSHYGMSWVRQTPDKRLEWVATIGSRGTYTHYPDSVKGRFTISRDNDKNALYLQMNSLRTEDTAMYYCARKSEFYYYGNTYYYSAMDYWGQGASVTVSSGGGGSGGGDSGGGGSDIVLTQSPASLAVSLGQRATISCRASESVDNYGFSFMNWFQQKPGQPPKLLIYATSNRGSGVPARFSGSGSGTDFSLNIHPVEEDDSAMYFCQQTKEVPWTFGGGTKLEIKR

SEQ ID NO: 128 - protein, 606 aa, synthetic construct
  source 1..606: note = HA-NLS-Keap1-(GS)3-3DX.1 peptide
MYPYDVPDYAPAAKRVKLDGSGSGSQPDPRPSGAGACCRFLPLQSQCPEGAGDAVMYASTECKAEVTPSQHGNRTFSYTLEDHTKQAFGIMNELRLSQQLCDVTLQVKYQDAPAAQFMAHKVVLASSSPVFKAMFTNGLREQGMEVVSIEGIHPKVMERLIEFAYTASISMGEKCVLHVMNGAVMYQIDSVVRACSDFLVQQLDPSNAIGIANFAEQIGCVELHQRAREYIYMHFGEVAKQEEFFNLSHCQLVTLISRDDLNVRCESEVFHACINWVKYDCEQRRFYVQALLRAVRCHSLTPNFLQMQLQKCEILQSDSRCKDYLVKIFEELTLHKPTQVMPCRAPGSGSGSEVKLVESGGDLVKPGGSLKLSCAASGFTFSHYGMSWVRQTPDKRLEWVATIGSRGTYTHYPDSVKGRFTISRDNDKNALYLQMNSLRTEDTAMYYCARKSEFYYYGNTYYYSAMDYWGQGASVTVSSGGGGSGGGDSGGGGSDIVLTQSPASLAVSLGQRATISCRASESVDNYGFSFMNWFQQKPGQPPKLLIYATSNRGSGVPARFSGSGSGTDFSLNIHPVEEDDSAMYFCQQTKEVPWTFGGGTKLEIKR

SEQ ID NO: 129 - protein, 608 aa, synthetic construct
  source 1..608: note = HA-NLS-Keap1-(GS)4-3DX.1 peptide
MYPYDVPDYAPAAKRVKLDGSGSGSQPDPRPSGAGACCRFLPLQSQCPEGAGDAVMYASTECKAEVTPSQHGNRTFSYTLEDHTKQAFGIMNELRLSQQLCDVTLQVKYQDAPAAQFMAHKVVLASSSPVFKAMFTNGLREQGMEVVSIEGIHPKVMERLIEFAYTASISMGEKCVLHVMNGAVMYQIDSVVRACSDFLVQQLDPSNAIGIANFAEQIGCVELHQRAREYIYMHFGEVAKQEEFFNLSHCQLVTLISRDDLNVRCESEVFHACINWVKYDCEQRRFYVQALLRAVRCHSLTPNFLQMQLQKCEILQSDSRCKDYLVKIFEELTLHKPTQVMPCRAPGSGSGSGSEVKLVESGGDLVKPGGSLKLSCAASGFTFSHYGMSWVRQTPDKRLEWVATIGSRGTYTHYPDSVKGRFTISRDNDKNALYLQMNSLRTEDTAMYYCARKSEFYYYGNTYYYSAMDYWGQGASVTVSSGGGGSGGGDSGGGGSDIVLTQSPASLAVSLGQRATISCRASESVDNYGFSFMNWFQQKPGQPPKLLIYATSNRGSGVPARFSGSGSGTDFSLNIHPVEEDDSAMYFCQQTKEVPWTFGGGTKLEIKR

SEQ ID NO: 130 - protein, 610 aa, synthetic construct
  source 1..610: note = HA-NLS-Keap1-(GS)5-3DX.1 peptide
MYPYDVPDYAPAAKRVKLDGSGSGSQPDPRPSGAGACCRFLPLQSQCPEGAGDAVMYASTECKAEVTPSQHGNRTFSYTLEDHTKQAFGIMNELRLSQQLCDVTLQVKYQDAPAAQFMAHKVVLASSSPVFKAMFTNGLREQGMEVVSIEGIHPKVMERLIEFAYTASISMGEKCVLHVMNGAVMYQIDSVVRACSDFLVQQLDPSNAIGIANFAEQIGCVELHQRAREYIYMHFGEVAKQEEFFNLSHCQLVTLISRDDLNVRCESEVFHACINWVKYDCEQRRFYVQALLRAVRCHSLTPNFLQMQLQKCEILQSDSRCKDYLVKIFEELTLHKPTQVMPCRAPGSGSGSGSGSEVKLVESGGDLVKPGGSLKLSCAASGFTFSHYGMSWVRQTPDKRLEWVATIGSRGTYTHYPDSVKGRFTISRDNDKNALYLQMNSLRTEDTAMYYCARKSEFYYYGNTYYYSAMDYWGQGASVTVSSGGGGSGGGDSGGGGSDIVLTQSPASLAVSLGQRATISCRASESVDNYGFSFMNWFQQKPGQPPKLLIYATSNRGSGVPARFSGSGSGTDFSLNIHPVEEDDSAMYFCQQTKEVPWTFGGGTKLEIKR

SEQ ID NO: 131 - protein, 612 aa, synthetic construct
  source 1..612: note = HA-NLS-Keap1-(GS)6-3DX.1 peptide
MYPYDVPDYAPAAKRVKLDGSGSGSQPDPRPSGAGACCRFLPLQSQCPEGAGDAVMYASTECKAEVTPSQHGNRTFSYTLEDHTKQAFGIMNELRLSQQLCDVTLQVKYQDAPAAQFMAHKVVLASSSPVFKAMFTNGLREQGMEVVSIEGIHPKVMERLIEFAYTASISMGEKCVLHVMNGAVMYQIDSVVRACSDFLVQQLDPSNAIGIANFAEQIGCVELHQRAREYIYMHFGEVAKQEEFFNLSHCQLVTLISRDDLNVRCESEVFHACINWVKYDCEQRRFYVQALLRAVRCHSLTPNFLQMQLQKCEILQSDSRCKDYLVKIFEELTLHKPTQVMPCRAPGSGSGSGSGSGSEVKLVESGGDLVKPGGSLKLSCAASGFTFSHYGMSWVRQTPDKRLEWVATIGSRGTYTHYPDSVKGRFTISRDNDKNALYLQMNSLRTEDTAMYYCARKSEFYYYGNTYYYSAMDYWGQGASVTVSSGGGGSGGGDSGGGGSDIVLTQSPASLAVSLGQRATISCRASESVDNYGFSFMNWFQQKPGQPPKLLIYATSNRGSGVPARFSGSGSGTDFSLNIHPVEEDDSAMYFCQQTKEVPWTFGGGTKLEIKR

SEQ ID NO: 132 - protein, 398 aa, synthetic construct
  source 1..398: note = NLS-RNF125-(GS)1-3DX.1 peptide
PAAKRVKLDGSGSGSGSVLSTDSGKSAPASATARALERRRDPELPVTSFDCAVCLEVLHQPVRTRCGHVFCRSCIATSLKNNKWTCPYCRAYLPSEGVPATDVAKRMKSEYKNCAECDTLVCLSEMRAHIRTCQKYIDKYGPGSEVKLVESGGDLVKPGGSLKLSCAASGFTFSHYGMSWVRQTPDKRLEWVATIGSRGTYTHYPDSVKGRFTISRDNDKNALYLQMNSLRTEDTAMYYCARKSEFYYYGNTYYYSAMDYWGQGASVTVSSGGGGSGGGDSGGGGSDIVLTQSPASLAVSLGQRATISCRASESVDNYGFSFMNWFQQKPGQPPKLLIYATSNRGSGVPARFSGSGSGTDFSLNIHPVEEDDSAMYFCQQTKEVPWTFGGGTKLEIKR

SEQ ID NO: 133 - protein, 400 aa, synthetic construct
  source 1..400: note = NLS-RNF125-(GS)2-3DX.1 peptide
PAAKRVKLDGSGSGSGSVLSTDSGKSAPASATARALERRRDPELPVTSFDCAVCLEVLHQPVRTRCGHVFCRSCIATSLKNNKWTCPYCRAYLPSEGVPATDVAKRMKSEYKNCAECDTLVCLSEMRAHIRTCQKYIDKYGPGSGSEVKLVESGGDLVKPGGSLKLSCAASGFTFSHYGMSWVRQTPDKRLEWVATIGSRGTYTHYPDSVKGRFTISRDNDKNALYLQMNSLRTEDTAMYYCARKSEFYYYGNTYYYSAMDYWGQGASVTVSSGGGGSGGGDSGGGGSDIVLTQSPASLAVSLGQRATISCRASESVDNYGFSFMNWFQQKPGQPPKLLIYATSNRGSGVPARFSGSGSGTDFSLNIHPVEEDDSAMYFCQQTKEVPWTFGGGTKLEIKR

SEQ ID NO: 134 - protein, 402 aa, synthetic construct
  source 1..402: note = NLS-RNF125-(GS)3-3DX.1 peptide
PAAKRVKLDGSGSGSGSVLSTDSGKSAPASATARALERRRDPELPVTSFDCAVCLEVLHQPVRTRCGHVFCRSCIATSLKNNKWTCPYCRAYLPSEGVPATDVAKRMKSEYKNCAECDTLVCLSEMRAHIRTCQKYIDKYGPGSGSGSEVKLVESGGDLVKPGGSLKLSCAASGFTFSHYGMSWVRQTPDKRLEWVATIGSRGTYTHYPDSVKGRFTISRDNDKNALYLQMNSLRTEDTAMYYCARKSEFYYYGNTYYYSAMDYWGQGASVTVSSGGGGSGGGDSGGGGSDIVLTQSPASLAVSLGQRATISCRASESVDNYGFSFMNWFQQKPGQPPKLLIYATSNRGSGVPARFSGSGSGTDFSLNIHPVEEDDSAMYFCQQTKEVPWTFGGGTKLEIKR

SEQ ID NO: 135 - protein, 404 aa, synthetic construct
  source 1..404: note = NLS-RNF125-(GS)4-3DX.1 peptide
PAAKRVKLDGSGSGSGSVLSTDSGKSAPASATARALERRRDPELPVTSFDCAVCLEVLHQPVRTRCGHVFCRSCIATSLKNNKWTCPYCRAYLPSEGVPATDVAKRMKSEYKNCAECDTLVCLSEMRAHIRTCQKYIDKYGPGSGSGSGSEVKLVESGGDLVKPGGSLKLSCAASGFTFSHYGMSWVRQTPDKRLEWVATIGSRGTYTHYPDSVKGRFTISRDNDKNALYLQMNSLRTEDTAMYYCARKSEFYYYGNTYYYSAMDYWGQGASVTVSSGGGGSGGGDSGGGGSDIVLTQSPASLAVSLGQRATISCRASESVDNYGFSFMNWFQQKPGQPPKLLIYATSNRGSGVPARFSGSGSGTDFSLNIHPVEEDDSAMYFCQQTKEVPWTFGGGTKLEIKR

SEQ ID NO: 136 - protein, 406 aa, synthetic construct
  source 1..406: note = NLS-RNF125-(GS)5-3DX.1 peptide
PAAKRVKLDGSGSGSGSVLSTDSGKSAPASATARALERRRDPELPVTSFDCAVCLEVLHQPVRTRCGHVFCRSCIATSLKNNKWTCPYCRAYLPSEGVPATDVAKRMKSEYKNCAECDTLVCLSEMRAHIRTCQKYIDKYGPGSGSGSGSGSEVKLVESGGDLVKPGGSLKLSCAASGFTFSHYGMSWVRQTPDKRLEWVATIGSRGTYTHYPDSVKGRFTISRDNDKNALYLQMNSLRTEDTAMYYCARKSEFYYYGNTYYYSAMDYWGQGASVTVSSGGGGSGGGDSGGGGSDIVLTQSPASLAVSLGQRATISCRASESVDNYGFSFMNWFQQKPGQPPKLLIYATSNRGSGVPARFSGSGSGTDFSLNIHPVEEDDSAMYFCQQTKEVPWTFGGGTKLEIKR

SEQ ID NO: 137 - protein, 408 aa, synthetic construct
  source 1..408: note = NLS-RNF125-(GS)6-3DX.1 peptide
PAAKRVKLDGSGSGSGSVLSTDSGKSAPASATARALERRRDPELPVTSFDCAVCLEVLHQPVRTRCGHVFCRSCIATSLKNNKWTCPYCRAYLPSEGVPATDVAKRMKSEYKNCAECDTLVCLSEMRAHIRTCQKYIDKYGPGSGSGSGSGSGSEVKLVESGGDLVKPGGSLKLSCAASGFTFSHYGMSWVRQTPDKRLEWVATIGSRGTYTHYPDSVKGRFTISRDNDKNALYLQMNSLRTEDTAMYYCARKSEFYYYGNTYYYSAMDYWGQGASVTVSSGGGGSGGGDSGGGGSDIVLTQSPASLAVSLGQRATISCRASESVDNYGFSFMNWFQQKPGQPPKLLIYATSNRGSGVPARFSGSGSGTDFSLNIHPVEEDDSAMYFCQQTKEVPWTFGGGTKLEIKR

SEQ ID NO: 138 - protein, 408 aa, synthetic construct
  source 1..408: note = HA-NLS-RNF125-(GS)1-3DX.1 peptide
MYPYDVPDYAPAAKRVKLDGSGSGSGSVLSTDSGKSAPASATARALERRRDPELPVTSFDCAVCLEVLHQPVRTRCGHVFCRSCIATSLKNNKWTCPYCRAYLPSEGVPATDVAKRMKSEYKNCAECDTLVCLSEMRAHIRTCQKYIDKYGPGSEVKLVESGGDLVKPGGSLKLSCAASGFTFSHYGMSWVRQTPDKRLEWVATIGSRGTYTHYPDSVKGRFTISRDNDKNALYLQMNSLRTEDTAMYYCARKSEFYYYGNTYYYSAMDYWGQGASVTVSSGGGGSGGGDSGGGGSDIVLTQSPASLAVSLGQRATISCRASESVDNYGFSFMNWFQQKPGQPPKLLIYATSNRGSGVPARFSGSGSGTDFSLNIHPVEEDDSAMYFCQQTKEVPWTFGGGTKLEIKR

SEQ ID NO: 139 - protein, 410 aa, synthetic construct
  source 1..410: note = HA-NLS-RNF125-(GS)2-3DX.1 peptide
MYPYDVPDYAPAAKRVKLDGSGSGSGSVLSTDSGKSAPASATARALERRRDPELPVTSFDCAVCLEVLHQPVRTRCGHVFCRSCIATSLKNNKWTCPYCRAYLPSEGVPATDVAKRMKSEYKNCAECDTLVCLSEMRAHIRTCQKYIDKYGPGSGSEVKLVESGGDLVKPGGSLKLSCAASGFTFSHYGMSWVRQTPDKRLEWVATIGSRGTYTHYPDSVKGRFTISRDNDKNALYLQMNSLRTEDTAMYYCARKSEFYYYGNTYYYSAMDYWGQGASVTVSSGGGGSGGGDSGGGGSDIVLTQSPASLAVSLGQRATISCRASESVDNYGFSFMNWFQQKPGQPPKLLIYATSNRGSGVPARFSGSGSGTDFSLNIHPVEEDDSAMYFCQQTKEVPWTFGGGTKLEIKR

SEQ ID NO: 140 - protein, 412 aa, synthetic construct
  source 1..412: note = HA-NLS-RNF125-(GS)3-3DX.1 peptide
MYPYDVPDYAPAAKRVKLDGSGSGSGSVLSTDSGKSAPASATARALERRRDPELPVTSFDCAVCLEVLHQPVRTRCGHVFCRSCIATSLKNNKWTCPYCRAYLPSEGVPATDVAKRMKSEYKNCAECDTLVCLSEMRAHIRTCQKYIDKYGPGSGSGSEVKLVESGGDLVKPGGSLKLSCAASGFTFSHYGMSWVRQTPDKRLEWVATIGSRGTYTHYPDSVKGRFTISRDNDKNALYLQMNSLRTEDTAMYYCARKSEFYYYGNTYYYSAMDYWGQGASVTVSSGGGGSGGGDSGGGGSDIVLTQSPASLAVSLGQRATISCRASESVDNYGFSFMNWFQQKPGQPPKLLIYATSNRGSGVPARFSGSGSGTDFSLNIHPVEEDDSAMYFCQQTKEVPWTFGGGTKLEIKR

SEQ ID NO: 141 - protein, 414 aa, synthetic construct
  source 1..414: note = HA-NLS-RNF125-(GS)4-3DX.1 peptide
MYPYDVPDYAPAAKRVKLDGSGSGSGSVLSTDSGKSAPASATARALERRRDPELPVTSFDCAVCLEVLHQPVRTRCGHVFCRSCIATSLKNNKWTCPYCRAYLPSEGVPATDVAKRMKSEYKNCAECDTLVCLSEMRAHIRTCQKYIDKYGPGSGSGSGSEVKLVESGGDLVKPGGSLKLSCAASGFTFSHYGMSWVRQTPDKRLEWVATIGSRGTYTHYPDSVKGRFTISRDNDKNALYLQMNSLRTEDTAMYYCARKSEFYYYGNTYYYSAMDYWGQGASVTVSSGGGGSGGGDSGGGGSDIVLTQSPASLAVSLGQRATISCRASESVDNYGFSFMNWFQQKPGQPPKLLIYATSNRGSGVPARFSGSGSGTDFSLNIHPVEEDDSAMYFCQQTKEVPWTFGGGTKLEIKR

SEQ ID NO: 142 - protein, 416 aa, synthetic construct
  source 1..416: note = HA-NLS-RNF125-(GS)5-3DX.1 peptide
MYPYDVPDYAPAAKRVKLDGSGSGSGSVLSTDSGKSAPASATARALERRRDPELPVTSFDCAVCLEVLHQPVRTRCGHVFCRSCIATSLKNNKWTCPYCRAYLPSEGVPATDVAKRMKSEYKNCAECDTLVCLSEMRAHIRTCQKYIDKYGPGSGSGSGSGSEVKLVESGGDLVKPGGSLKLSCAASGFTFSHYGMSWVRQTPDKRLEWVATIGSRGTYTHYPDSVKGRFTISRDNDKNALYLQMNSLRTEDTAMYYCARKSEFYYYGNTYYYSAMDYWGQGASVTVSSGGGGSGGGDSGGGGSDIVLTQSPASLAVSLGQRATISCRASESVDNYGFSFMNWFQQKPGQPPKLLIYATSNRGSGVPARFSGSGSGTDFSLNIHPVEEDDSAMYFCQQTKEVPWTFGGGTKLEIKR

SEQ ID NO: 143 - protein, 418 aa, synthetic construct
  source 1..418: note = HA-NLS-RNF125-(GS)6-3DX.1 peptide
MYPYDVPDYAPAAKRVKLDGSGSGSGSVLSTDSGKSAPASATARALERRRDPELPVTSFDCAVCLEVLHQPVRTRCGHVFCRSCIATSLKNNKWTCPYCRAYLPSEGVPATDVAKRMKSEYKNCAECDTLVCLSEMRAHIRTCQKYIDKYGPGSGSGSGSGSGSEVKLVESGGDLVKPGGSLKLSCAASGFTFSHYGMSWVRQTPDKRLEWVATIGSRGTYTHYPDSVKGRFTISRDNDKNALYLQMNSLRTEDTAMYYCARKSEFYYYGNTYYYSAMDYWGQGASVTVSSGGGGSGGGDSGGGGSDIVLTQSPASLAVSLGQRATISCRASESVDNYGFSFMNWFQQKPGQPPKLLIYATSNRGSGVPARFSGSGSGTDFSLNIHPVEEDDSAMYFCQQTKEVPWTFGGGTKLEIKR

SEQ ID NO: 144 - protein, 498 aa, synthetic construct
  source 1..498: note = 3DX.1-(GS)1-SPOP-NLS peptide
MEVKLVESGGDLVKPGGSLKLSCAASGFTFSHYGMSWVRQTPDKRLEWVATIGSRGTYTHYPDSVKGRFTISRDNDKNALYLQMNSLRTEDTAMYYCARKSEFYYYGNTYYYSAMDYWGQGASVTVSSGGGGSGGGDSGGGGSDIVLTQSPASLAVSLGQRATISCRASESVDNYGFSFMNWFQQKPGQPPKLLIYATSNRGSGVPARFSGSGSGTDFSLNIHPVEEDDSAMYFCQQTKEVPWTFGGGTKLEIKRGSNGLLPDDKLTLFCEVSVVQDSVNISGQNTMNMVKVPECRLADELGGLWENSRFTDCCLCVAGQEFQAHKAILAARSPVFSAMFEHEMEESKKNRVEINDVEPEVFKEMMCFIYTGKAPNLDKMADDLLAAADKYALERLKVMCEDALCSNLSVENAAEILILADLHSADQLKTQAVDFINYHASDVLETSGWKSMVVSHPHLVAEAYRSLASAQCPFLGPPRKRLKQSGSGSPAAKRVKLD

SEQ ID NO: 145 - protein, 500 aa, synthetic construct
  source 1..500: note = 3DX.1-(GS)2-SPOP-NLS peptide
MEVKLVESGGDLVKPGGSLKLSCAASGFTFSHYGMSWVRQTPDKRLEWVATIGSRGTYTHYPDSVKGRFTISRDNDKNALYLQMNSLRTEDTAMYYCARKSEFYYYGNTYYYSAMDYWGQGASVTVSSGGGGSGGGDSGGGGSDIVLTQSPASLAVSLGQRATISCRASESVDNYGFSFMNWFQQKPGQPPKLLIYATSNRGSGVPARFSGSGSGTDFSLNIHPVEEDDSAMYFCQQTKEVPWTFGGGTKLEIKRGSGSNGLLPDDKLTLFCEVSVVQDSVNISGQNTMNMVKVPECRLADELGGLWENSRFTDCCLCVAGQEFQAHKAILAARSPVFSAMFEHEMEESKKNRVEINDVEPEVFKEMMCFIYTGKAPNLDKMADDLLAAADKYALERLKVMCEDALCSNLSVENAAEILILADLHSADQLKTQAVDFINYHASDVLETSGWKSMVVSHPHLVAEAYRSLASAQCPFLGPPRKRLKQSGSGSPAAKRVKLD

SEQ ID NO: 146 - protein, 502 aa, synthetic construct
  source 1..502: note = 3DX.1-(GS)3-SPOP-NLS peptide
MEVKLVESGGDLVKPGGSLKLSCAASGFTFSHYGMSWVRQTPDKRLEWVATIGSRGTYTHYPDSVKGRFTISRDNDKNALYLQMNSLRTEDTAMYYCARKSEFYYYGNTYYYSAMDYWGQGASVTVSSGGGGSGGGDSGGGGSDIVLTQSPASLAVSLGQRATISCRASESVDNYGFSFMNWFQQKPGQPPKLLIYATSNRGSGVPARFSGSGSGTDFSLNIHPVEEDDSAMYFCQQTKEVPWTFGGGTKLEIKRGSGSGSNGLLPDDKLTLFCEVSVVQDSVNISGQNTMNMVKVPECRLADELGGLWENSRFTDCCLCVAGQEFQAHKAILAARSPVFSAMFEHEMEESKKNRVEINDVEPEVFKEMMCFIYTGKAPNLDKMADDLLAAADKYALERLKVMCEDALCSNLSVENAAEILILADLHSADQLKTQAVDFINYHASDVLETSGWKSMVVSHPHLVAEAYRSLASAQCPFLGPPRKRLKQSGSGSPAAKRVKLD

SEQ ID NO: 147 - protein, 504 aa, synthetic construct
  source 1..504: note = 3DX.1-(GS)4-SPOP-NLS peptide
MEVKLVESGGDLVKPGGSLKLSCAASGFTFSHYGMSWVRQTPDKRLEWVATIGSRGTYTHYPDSVKGRFTISRDNDKNALYLQMNSLRTEDTAMYYCARKSEFYYYGNTYYYSAMDYWGQGASVTVSSGGGGSGGGDSGGGGSDIVLTQSPASLAVSLGQRATISCRASESVDNYGFSFMNWFQQKPGQPPKLLIYATSNRGSGVPARFSGSGSGTDFSLNIHPVEEDDSAMYFCQQTKEVPWTFGGGTKLEIKRGSGSGSGSNGLLPDDKLTLFCEVSVVQDSVNISGQNTMNMVKVPECRLADELGGLWENSRFTDCCLCVAGQEFQAHKAILAARSPVFSAMFEHEMEESKKNRVEINDVEPEVFKEMMCFIYTGKAPNLDKMADDLLAAADKYALERLKVMCEDALCSNLSVENAAEILILADLHSADQLKTQAVDFINYHASDVLETSGWKSMVVSHPHLVAEAYRSLASAQCPFLGPPRKRLKQSGSGSPAAKRVKLD

SEQ ID NO: 148 - protein, 507 aa, synthetic construct
  source 1..507: note = 3DX.1-(GS)5-SPOP-NLS peptide
MEVKLVESGGDLVKPGGSLKLSCAASGFTFSHYGMSWVRQTPDKRLEWVATIGSRGTYTHYPDSVKGRFTISRDNDKNALYLQMNSLRTEDTAMYYCARKSEFYYYGNTYYYSAMDYWGQGASVTVSSGGGGSGGGDSGGGGSDIVLTQSPASLAVSLGQRATISCRASESVDNYGFSFMNWFQQKPGQPPKLLIYATSNRGSGVPARFSGSGSGTDFSLNIHPVEEDDSAMYFCQQTKEVPWTFGGGTKLEIKRGSGSGSGSGSNGLLPDDKLTLFCEVSVVQDSVNISGQNTMNMVKVPECRLADELGGLWENSRFTDCCLCVAGQEFQAHKAILAARSPVFSAMFEHEMEESKKNRVEINDVEPEVFKEMMCFIYTGKAPNLDKMADDLLAAADKYALERLKVMCEDALCSNLSVENAAEILILADLHSADQLKTQAVDFINYHASDVLETSGWKSMVVSHPHLVAEAYRSLASAQCPFLGPPRKRLKQSGSGSPAAKRVKLDA

SEQ ID NO: 149 - protein, 508 aa, synthetic construct
  source 1..508: note = 3DX.1-(GS)6-SPOP-NLS peptide
MEVKLVESGGDLVKPGGSLKLSCAASGFTFSHYGMSWVRQTPDKRLEWVATIGSRGTYTHYPDSVKGRFTISRDNDKNALYLQMNSLRTEDTAMYYCARKSEFYYYGNTYYYSAMDYWGQGASVTVSSGGGGSGGGDSGGGGSDIVLTQSPASLAVSLGQRATISCRASESVDNYGFSFMNWFQQKPGQPPKLLIYATSNRGSGVPARFSGSGSGTDFSLNIHPVEEDDSAMYFCQQTKEVPWTFGGGTKLEIKRGSGSGSGSGSGSNGLLPDDKLTLFCEVSVVQDSVNISGQNTMNMVKVPECRLADELGGLWENSRFTDCCLCVAGQEFQAHKAILAARSPVFSAMFEHEMEESKKNRVEINDVEPEVFKEMMCFIYTGKAPNLDKMADDLLAAADKYALERLKVMCEDALCSNLSVENAAEILILADLHSADQLKTQAVDFINYHASDVLETSGWKSMVVSHPHLVAEAYRSLASAQCPFLGPPRKRLKQSGSGSPAAKRVKLD

SEQ ID NO: 150 - protein, 507 aa, synthetic construct
  source 1..507: note = 3DX.1-(GS)1-SPOP-NLS-HA peptide
MEVKLVESGGDLVKPGGSLKLSCAASGFTFSHYGMSWVRQTPDKRLEWVATIGSRGTYTHYPDSVKGRFTISRDNDKNALYLQMNSLRTEDTAMYYCARKSEFYYYGNTYYYSAMDYWGQGASVTVSSGGGGSGGGDSGGGGSDIVLTQSPASLAVSLGQRATISCRASESVDNYGFSFMNWFQQKPGQPPKLLIYATSNRGSGVPARFSGSGSGTDFSLNIHPVEEDDSAMYFCQQTKEVPWTFGGGTKLEIKRGSNGLLPDDKLTLFCEVSVVQDSVNISGQNTMNMVKVPECRLADELGGLWENSRFTDCCLCVAGQEFQAHKAILAARSPVFSAMFEHEMEESKKNRVEINDVEPEVFKEMMCFIYTGKAPNLDKMADDLLAAADKYALERLKVMCEDALCSNLSVENAAEILILADLHSADQLKTQAVDFINYHASDVLETSGWKSMVVSHPHLVAEAYRSLASAQCPFLGPPRKRLKQSGSGSPAAKRVKLDYPYDVPDYA

SEQ ID NO: 151 - protein, 509 aa, synthetic construct
  source 1..509: note = 3DX.1-(GS)2-SPOP-NLS-HA peptide
MEVKLVESGGDLVKPGGSLKLSCAASGFTFSHYGMSWVRQTPDKRLEWVATIGSRGTYTHYPDSVKGRFTISRDNDKNALYLQMNSLRTEDTAMYYCARKSEFYYYGNTYYYSAMDYWGQGASVTVSSGGGGSGGGDSGGGGSDIVLTQSPASLAVSLGQRATISCRASESVDNYGFSFMNWFQQKPGQPPKLLIYATSNRGSGVPARFSGSGSGTDFSLNIHPVEEDDSAMYFCQQTKEVPWTFGGGTKLEIKRGSGSNGLLPDDKLTLFCEVSVVQDSVNISGQNTMNMVKVPECRLADELGGLWENSRFTDCCLCVAGQEFQAHKAILAARSPVFSAMFEHEMEESKKNRVEINDVEPEVFKEMMCFIYTGKAPNLDKMADDLLAAADKYALERLKVMCEDALCSNLSVENAAEILILADLHSADQLKTQAVDFINYHASDVLETSGWKSMVVSHPHLVAEAYRSLASAQCPFLGPPRKRLKQSGSGSPAAKRVKLDYPYDVPDYA

SEQ ID NO: 152 - protein, 511 aa, synthetic construct
  source 1..511: note = 3DX.1-(GS)3-SPOP-NLS-HA peptide
MEVKLVESGGDLVKPGGSLKLSCAASGFTFSHYGMSWVRQTPDKRLEWVATIGSRGTYTHYPDSVKGRFTISRDNDKNALYLQMNSLRTEDTAMYYCARKSEFYYYGNTYYYSAMDYWGQGASVTVSSGGGGSGGGDSGGGGSDIVLTQSPASLAVSLGQRATISCRASESVDNYGFSFMNWFQQKPGQPPKLLIYATSNRGSGVPARFSGSGSGTDFSLNIHPVEEDDSAMYFCQQTKEVPWTFGGGTKLEIKRGSGSGSNGLLPDDKLTLFCEVSVVQDSVNISGQNTMNMVKVPECRLADELGGLWENSRFTDCCLCVAGQEFQAHKAILAARSPVFSAMFEHEMEESKKNRVEINDVEPEVFKEMMCFIYTGKAPNLDKMADDLLAAADKYALERLKVMCEDALCSNLSVENAAEILILADLHSADQLKTQAVDFINYHASDVLETSGWKSMVVSHPHLVAEAYRSLASAQCPFLGPPRKRLKQSGSGSPAAKRVKLDYPYDVPDYA

SEQ ID NO: 153 - protein, 513 aa, synthetic construct
  source 1..513: note = 3DX.1-(GS)4-SPOP-NLS-HA peptide
MEVKLVESGGDLVKPGGSLKLSCAASGFTFSHYGMSWVRQTPDKRLEWVATIGSRGTYTHYPDSVKGRFTISRDNDKNALYLQMNSLRTEDTAMYYCARKSEFYYYGNTYYYSAMDYWGQGASVTVSSGGGGSGGGDSGGGGSDIVLTQSPASLAVSLGQRATISCRASESVDNYGFSFMNWFQQKPGQPPKLLIYATSNRGSGVPARFSGSGSGTDFSLNIHPVEEDDSAMYFCQQTKEVPWTFGGGTKLEIKRGSGSGSGSNGLLPDDKLTLFCEVSVVQDSVNISGQNTMNMVKVPECRLADELGGLWENSRFTDCCLCVAGQEFQAHKAILAARSPVFSAMFEHEMEESKKNRVEINDVEPEVFKEMMCFIYTGKAPNLDKMADDLLAAADKYALERLKVMCEDALCSNLSVENAAEILILADLHSADQLKTQAVDFINYHASDVLETSGWKSMVVSHPHLVAEAYRSLASAQCPFLGPPRKRLKQSGSGSPAAKRVKLDYPYDVPDYA

SEQ ID NO: 154 - protein, 516 aa, synthetic construct
  source 1..516: note = 3DX.1-(GS)5-SPOP-NLS-HA peptide
MEVKLVESGGDLVKPGGSLKLSCAASGFTFSHYGMSWVRQTPDKRLEWVATIGSRGTYTHYPDSVKGRFTISRDNDKNALYLQMNSLRTEDTAMYYCARKSEFYYYGNTYYYSAMDYWGQGASVTVSSGGGGSGGGDSGGGGSDIVLTQSPASLAVSLGQRATISCRASESVDNYGFSFMNWFQQKPGQPPKLLIYATSNRGSGVPARFSGSGSGTDFSLNIHPVEEDDSAMYFCQQTKEVPWTFGGGTKLEIKRGSGSGSGSGSNGLLPDDKLTLFCEVSVVQDSVNISGQNTMNMVKVPECRLADELGGLWENSRFTDCCLCVAGQEFQAHKAILAARSPVFSAMFEHEMEESKKNRVEINDVEPEVFKEMMCFIYTGKAPNLDKMADDLLAAADKYALERLKVMCEDALCSNLSVENAAEILILADLHSADQLKTQAVDFINYHASDVLETSGWKSMVVSHPHLVAEAYRSLASAQCPFLGPPRKRLKQSGSGSPAAKRVKLDYPYDVPDYAA

SEQ ID NO: 155 - protein, 517 aa, synthetic construct
  source 1..517: note = 3DX.1-(GS)6-SPOP-NLS-HA peptide
MEVKLVESGGDLVKPGGSLKLSCAASGFTFSHYGMSWVRQTPDKRLEWVATIGSRGTYTHYPDSVKGRFTISRDNDKNALYLQMNSLRTEDTAMYYCARKSEFYYYGNTYYYSAMDYWGQGASVTVSSGGGGSGGGDSGGGGSDIVLTQSPASLAVSLGQRATISCRASESVDNYGFSFMNWFQQKPGQPPKLLIYATSNRGSGVPARFSGSGSGTDFSLNIHPVEEDDSAMYFCQQTKEVPWTFGGGTKLEIKRGSGSGSGSGSGSNGLLPDDKLTLFCEVSVVQDSVNISGQNTMNMVKVPECRLADELGGLWENSRFTDCCLCVAGQEFQAHKAILAARSPVFSAMFEHEMEESKKNRVEINDVEPEVFKEMMCFIYTGKAPNLDKMADDLLAAADKYALERLKVMCEDALCSNLSVENAAEILILADLHSADQLKTQAVDFINYHASDVLETSGWKSMVVSHPHLVAEAYRSLASAQCPFLGPPRKRLKQSGSGSPAAKRVKLDYPYDVPDYA

SEQ ID NO: 156 - protein, 446 aa, synthetic construct
  source 1..446: note = 3DX.2-(GS)1-CHIP-NLS peptide
MDIVLTQSPASLAVSLGQRATISCRASESVDNYGFSFMNWFQQKPGQPPKLLIYATSNRGSGVPARFSGSGSGTDFSLNIHPVEEDDSAMYFCQQTKEVPWTFGGGTKLEIKRGGGGSGGGDSGGGGSEVKLVESGGDLVKPGGSLKLSCAASGFTFSHYGMSWVRQTPDKRLEWVATIGSRGTYTHYPDSVKGRFTISRDNDKNALYLQMNSLRTEDTAMYYCARKSEFYYYGNTYYYSAMDYWGQGASVTVSSGSRLNFGDDIPSALRIAKKKRWNSIEERRIHQESELHSYLSRLIAAERERELEECQRNHEGDEDDSHVRAQQACIEAKHDKYMADMDELFSQVDEKRKKRDIPDYLCGKISFELMREPCITPSGITYDRKDIEEHLQRVGHFDPVTRSPLTQEQLIPNLAMKEVIDAFISENGWVEDYGSGSPAAKRVKLD

SEQ ID NO: 157 - protein, 448 aa, synthetic construct
  source 1..448: note = 3DX.2-(GS)2-CHIP-NLS peptide
MDIVLTQSPASLAVSLGQRATISCRASESVDNYGFSFMNWFQQKPGQPPKLLIYATSNRGSGVPARFSGSGSGTDFSLNIHPVEEDDSAMYFCQQTKEVPWTFGGGTKLEIKRGGGGSGGGDSGGGGSEVKLVESGGDLVKPGGSLKLSCAASGFTFSHYGMSWVRQTPDKRLEWVATIGSRGTYTHYPDSVKGRFTISRDNDKNALYLQMNSLRTEDTAMYYCARKSEFYYYGNTYYYSAMDYWGQGASVTVSSGSGSRLNFGDDIPSALRIAKKKRWNSIEERRIHQESELHSYLSRLIAAERERELEECQRNHEGDEDDSHVRAQQACIEAKHDKYMADMDELFSQVDEKRKKRDIPDYLCGKISFELMREPCITPSGITYDRKDIEEHLQRVGHFDPVTRSPLTQEQLIPNLAMKEVIDAFISENGWVEDYGSGSPAAKRVKLD

SEQ ID NO: 158 - protein, 450 aa, synthetic construct
  source 1..450: note = 3DX.2-(GS)3-CHIP-NLS peptide
MDIVLTQSPASLAVSLGQRATISCRASESVDNYGFSFMNWFQQKPGQPPKLLIYATSNRGSGVPARFSGSGSGTDFSLNIHPVEEDDSAMYFCQQTKEVPWTFGGGTKLEIKRGGGGSGGGDSGGGGSEVKLVESGGDLVKPGGSLKLSCAASGFTFSHYGMSWVRQTPDKRLEWVATIGSRGTYTHYPDSVKGRFTISRDNDKNALYLQMNSLRTEDTAMYYCARKSEFYYYGNTYYYSAMDYWGQGASVTVSSGSGSGSRLNFGDDIPSALRIAKKKRWNSIEERRIHQESELHSYLSRLIAAERERELEECQRNHEGDEDDSHVRAQQACIEAKHDKYMADMDELFSQVDEKRKKRDIPDYLCGKISFELMREPCITPSGITYDRKDIEEHLQRVGHFDPVTRSPLTQEQLIPNLAMKEVIDAFISENGWVEDYGSGSPAAKRVKLD

SEQ ID NO: 159 - protein, 452 aa, synthetic construct
  source 1..452: note = 3DX.2-(GS)4-CHIP-NLS peptide
MDIVLTQSPASLAVSLGQRATISCRASESVDNYGFSFMNWFQQKPGQPPKLLIYATSNRGSGVPARFSGSGSGTDFSLNIHPVEEDDSAMYFCQQTKEVPWTFGGGTKLEIKRGGGGSGGGDSGGGGSEVKLVESGGDLVKPGGSLKLSCAASGFTFSHYGMSWVRQTPDKRLEWVATIGSRGTYTHYPDSVKGRFTISRDNDKNALYLQMNSLRTEDTAMYYCARKSEFYYYGNTYYYSAMDYWGQGASVTVSSGSGSGSGSRLNFGDDIPSALRIAKKKRWNSIEERRIHQESELHSYLSRLIAAERERELEECQRNHEGDEDDSHVRAQQACIEAKHDKYMADMDELFSQVDEKRKKRDIPDYLCGKISFELMREPCITPSGITYDRKDIEEHLQRVGHFDPVTRSPLTQEQLIPNLAMKEVIDAFISENGWVEDYGSGSPAAKRVKLD

SEQ ID NO: 160 - protein, 454 aa, synthetic construct
  source 1..454: note = 3DX.2-(GS)5-CHIP-NLS peptide
MDIVLTQSPASLAVSLGQRATISCRASESVDNYGFSFMNWFQQKPGQPPKLLIYATSNRGSGVPARFSGSGSGTDFSLNIHPVEEDDSAMYFCQQTKEVPWTFGGGTKLEIKRGGGGSGGGDSGGGGSEVKLVESGGDLVKPGGSLKLSCAASGFTFSHYGMSWVRQTPDKRLEWVATIGSRGTYTHYPDSVKGRFTISRDNDKNALYLQMNSLRTEDTAMYYCARKSEFYYYGNTYYYSAMDYWGQGASVTVSSGSGSGSGSGSRLNFGDDIPSALRIAKKKRWNSIEERRIHQESELHSYLSRLIAAERERELEECQRNHEGDEDDSHVRAQQACIEAKHDKYMADMDELFSQVDEKRKKRDIPDYLCGKISFELMREPCITPSGITYDRKDIEEHLQRVGHFDPVTRSPLTQEQLIPNLAMKEVIDAFISENGWVEDYGSGSPAAKRVKLD

SEQ ID NO: 161 - protein, 456 aa, synthetic construct
  source 1..456: note = 3DX.2-(GS)6-CHIP-NLS peptide
MDIVLTQSPASLAVSLGQRATISCRASESVDNYGFSFMNWFQQKPGQPPKLLIYATSNRGSGVPARFSGSGSGTDFSLNIHPVEEDDSAMYFCQQTKEVPWTFGGGTKLEIKRGGGGSGGGDSGGGGSEVKLVESGGDLVKPGGSLKLSCAASGFTFSHYGMSWVRQTPDKRLEWVATIGSRGTYTHYPDSVKGRFTISRDNDKNALYLQMNSLRTEDTAMYYCARKSEFYYYGNTYYYSAMDYWGQGASVTVSSGSGSGSGSGSGSRLNFGDDIPSALRIAKKKRWNSIEERRIHQESELHSYLSRLIAAERERELEECQRNHEGDEDDSHVRAQQACIEAKHDKYMADMDELFSQVDEKRKKRDIPDYLCGKISFELMREPCITPSGITYDRKDIEEHLQRVGHFDPVTRSPLTQEQLIPNLAMKEVIDAFISENGWVEDYGSGSPAAKRVKLD

SEQ ID NO: 162 - protein, 455 aa, synthetic construct
  source 1..455: note = 3DX.2-(GS)1-CHIP-NLS-HA peptide
MDIVLTQSPASLAVSLGQRATISCRASESVDNYGFSFMNWFQQKPGQPPKLLIYATSNRGSGVPARFSGSGSGTDFSLNIHPVEEDDSAMYFCQQTKEVPWTFGGGTKLEIKRGGGGSGGGDSGGGGSEVKLVESGGDLVKPGGSLKLSCAASGFTFSHYGMSWVRQTPDKRLEWVATIGSRGTYTHYPDSVKGRFTISRDNDKNALYLQMNSLRTEDTAMYYCARKSEFYYYGNTYYYSAMDYWGQGASVTVSSGSRLNFGDDIPSALRIAKKKRWNSIEERRIHQESELHSYLSRLIAAERERELEECQRNHEGDEDDSHVRAQQACIEAKHDKYMADMDELFSQVDEKRKKRDIPDYLCGKISFELMREPCITPSGITYDRKDIEEHLQRVGHFDPVTRSPLTQEQLIPNLAMKEVIDAFISENGWVEDYGSGSPAAKRVKLDYPYDVPDYA

SEQ ID NO: 163 - protein, 457 aa, synthetic construct
  source 1..457: note = 3DX.2-(GS)2-CHIP-NLS-HA peptide
MDIVLTQSPASLAVSLGQRATISCRASESVDNYGFSFMNWFQQKPGQPPKLLIYATSNRGSGVPARFSGSGSGTDFSLNIHPVEEDDSAMYFCQQTKEVPWTFGGGTKLEIKRGGGGSGGGDSGGGGSEVKLVESGGDLVKPGGSLKLSCAASGFTFSHYGMSWVRQTPDKRLEWVATIGSRGTYTHYPDSVKGRFTISRDNDKNALYLQMNSLRTEDTAMYYCARKSEFYYYGNTYYYSAMDYWGQGASVTVSSGSGSRLNFGDDIPSALRIAKKKRWNSIEERRIHQESELHSYLSRLIAAERERELEECQRNHEGDEDDSHVRAQQACIEAKHDKYMADMDELFSQVDEKRKKRDIPDYLCGKISFELMREPCITPSGITYDRKDIEEHLQRVGHFDPVTRSPLTQEQLIPNLAMKEVIDAFISENGWVEDYGSGSPAAKRVKLDYPYDVPDYA

SEQ ID NO: 164 - protein, 459 aa, synthetic construct
  source 1..459: note = 3DX.2-(GS)3-CHIP-NLS-HA peptide
MDIVLTQSPASLAVSLGQRATISCRASESVDNYGFSFMNWFQQKPGQPPKLLIYATSNRGSGVPARFSGSGSGTDFSLNIHPVEEDDSAMYFCQQTKEVPWTFGGGTKLEIKRGGGGSGGGDSGGGGSEVKLVESGGDLVKPGGSLKLSCAASGFTFSHYGMSWVRQTPDKRLEWVATIGSRGTYTHYPDSVKGRFTISRDNDKNALYLQMNSLRTEDTAMYYCARKSEFYYYGNTYYYSAMDYWGQGASVTVSSGSGSGSRLNFGDDIPSALRIAKKKRWNSIEERRIHQESELHSYLSRLIAAERERELEECQRNHEGDEDDSHVRAQQACIEAKHDKYMADMDELFSQVDEKRKKRDIPDYLCGKISFELMREPCITPSGITYDRKDIEEHLQRVGHFDPVTRSPLTQEQLIPNLAMKEVIDAFISENGWVEDYGSGSPAAKRVKLDYPYDVPDYA

SEQ ID NO: 165 - protein, 461 aa, synthetic construct
  source 1..461: note = 3DX.2-(GS)4-CHIP-NLS-HA peptide
MDIVLTQSPASLAVSLGQRATISCRASESVDNYGFSFMNWFQQKPGQPPKLLIYATSNRGSGVPARFSGSGSGTDFSLNIHPVEEDDSAMYFCQQTKEVPWTFGGGTKLEIKRGGGGSGGGDSGGGGSEVKLVESGGDLVKPGGSLKLSCAASGFTFSHYGMSWVRQTPDKRLEWVATIGSRGTYTHYPDSVKGRFTISRDNDKNALYLQMNSLRTEDTAMYYCARKSEFYYYGNTYYYSAMDYWGQGASVTVSSGSGSGSGSRLNFGDDIPSALRIAKKKRWNSIEERRIHQESELHSYLSRLIAAERERELEECQRNHEGDEDDSHVRAQQACIEAKHDKYMADMDELFSQVDEKRKKRDIPDYLCGKISFELMREPCITPSGITYDRKDIEEHLQRVGHFDPVTRSPLTQEQLIPNLAMKEVIDAFISENGWVEDYGSGSPAAKRVKLDYPYDVPDYA

SEQ ID NO: 166 - protein, 463 aa, synthetic construct
  source 1..463: note = 3DX.2-(GS)5-CHIP-NLS-HA peptide
MDIVLTQSPASLAVSLGQRATISCRASESVDNYGFSFMNWFQQKPGQPPKLLIYATSNRGSGVPARFSGSGSGTDFSLNIHPVEEDDSAMYFCQQTKEVPWTFGGGTKLEIKRGGGGSGGGDSGGGGSEVKLVESGGDLVKPGGSLKLSCAASGFTFSHYGMSWVRQTPDKRLEWVATIGSRGTYTHYPDSVKGRFTISRDNDKNALYLQMNSLRTEDTAMYYCARKSEFYYYGNTYYYSAMDYWGQGASVTVSSGSGSGSGSGSRLNFGDDIPSALRIAKKKRWNSIEERRIHQESELHSYLSRLIAAERERELEECQRNHEGDEDDSHVRAQQACIEAKHDKYMADMDELFSQVDEKRKKRDIPDYLCGKISFELMREPCITPSGITYDRKDIEEHLQRVGHFDPVTRSPLTQEQLIPNLAMKEVIDAFISENGWVEDYGSGSPAAKRVKLDYPYDVPDYA

SEQ ID NO: 167 - protein, 465 aa, synthetic construct
  source 1..465: note = 3DX.2-(GS)6-CHIP-NLS-HA peptide
MDIVLTQSPASLAVSLGQRATISCRASESVDNYGFSFMNWFQQKPGQPPKLLIYATSNRGSGVPARFSGSGSGTDFSLNIHPVEEDDSAMYFCQQTKEVPWTFGGGTKLEIKRGGGGSGGGDSGGGGSEVKLVESGGDLVKPGGSLKLSCAASGFTFSHYGMSWVRQTPDKRLEWVATIGSRGTYTHYPDSVKGRFTISRDNDKNALYLQMNSLRTEDTAMYYCARKSEFYYYGNTYYYSAMDYWGQGASVTVSSGSGSGSGSGSGSRLNFGDDIPSALRIAKKKRWNSIEERRIHQESELHSYLSRLIAAERERELEECQRNHEGDEDDSHVRAQQACIEAKHDKYMADMDELFSQVDEKRKKRDIPDYLCGKISFELMREPCITPSGITYDRKDIEEHLQRVGHFDPVTRSPLTQEQLIPNLAMKEVIDAFISENGWVEDYGSGSPAAKRVKLDYPYDVPDYA

SEQ ID NO: 168 - protein, 306 aa, synthetic construct
  source 1..306: note = NLS-DCAF1-(GS)1-3DX.2 peptide
PAAKRVKLDGSGSGSQAPINFTSRLNRRASFPKYGGVDGGCFDRHLIFSRGSDIVLTQSPASLAVSLGQRATISCRASESVDNYGFSFMNWFQQKPGQPPKLLIYATSNRGSGVPARFSGSGSGTDFSLNIHPVEEDDSAMYFCQQTKEVPWTFGGGTKLEIKRGGGGSGGGDSGGGGSEVKLVESGGDLVKPGGSLKLSCAASGFTFSHYGMSWVRQTPDKRLEWVATIGSRGTYTHYPDSVKGRFTISRDNDKNALYLQMNSLRTEDTAMYYCARKSEFYYYGNTYYYSAMDYWGQGASVTVSS

SEQ ID NO: 169 - protein, 308 aa, synthetic construct
  source 1..308: note = NLS-DCAF1-(GS)2-3DX.2 peptide
PAAKRVKLDGSGSGSQAPINFTSRLNRRASFPKYGGVDGGCFDRHLIFSRGSGSDIVLTQSPASLAVSLGQRATISCRASESVDNYGFSFMNWFQQKPGQPPKLLIYATSNRGSGVPARFSGSGSGTDFSLNIHPVEEDDSAMYFCQQTKEVPWTFGGGTKLEIKRGGGGSGGGDSGGGGSEVKLVESGGDLVKPGGSLKLSCAASGFTFSHYGMSWVRQTPDKRLEWVATIGSRGTYTHYPDSVKGRFTISRDNDKNALYLQMNSLRTEDTAMYYCARKSEFYYYGNTYYYSAMDYWGQGASVTVSS

SEQ ID NO: 170 - protein, 310 aa, synthetic construct
  source 1..310: note = NLS-DCAF1-(GS)3-3DX.2 peptide
PAAKRVKLDGSGSGSQAPINFTSRLNRRASFPKYGGVDGGCFDRHLIFSRGSGSGSDIVLTQSPASLAVSLGQRATISCRASESVDNYGFSFMNWFQQKPGQPPKLLIYATSNRGSGVPARFSGSGSGTDFSLNIHPVEEDDSAMYFCQQTKEVPWTFGGGTKLEIKRGGGGSGGGDSGGGGSEVKLVESGGDLVKPGGSLKLSCAASGFTFSHYGMSWVRQTPDKRLEWVATIGSRGTYTHYPDSVKGRFTISRDNDKNALYLQMNSLRTEDTAMYYCARKSEFYYYGNTYYYSAMDYWGQGASVTVSS

SEQ ID NO: 171 - protein, 312 aa, synthetic construct
  source 1..312: note = NLS-DCAF1-(GS)4-3DX.2 peptide
PAAKRVKLDGSGSGSQAPINFTSRLNRRASFPKYGGVDGGCFDRHLIFSRGSGSGSGSDIVLTQSPASLAVSLGQRATISCRASESVDNYGFSFMNWFQQKPGQPPKLLIYATSNRGSGVPARFSGSGSGTDFSLNIHPVEEDDSAMYFCQQTKEVPWTFGGGTKLEIKRGGGGSGGGDSGGGGSEVKLVESGGDLVKPGGSLKLSCAASGFTFSHYGMSWVRQTPDKRLEWVATIGSRGTYTHYPDSVKGRFTISRDNDKNALYLQMNSLRTEDTAMYYCARKSEFYYYGNTYYYSAMDYWGQGASVTVSS

SEQ ID NO: 172 - protein, 314 aa, synthetic construct
  source 1..314: note = NLS-DCAF1-(GS)5-3DX.2 peptide
PAAKRVKLDGSGSGSQAPINFTSRLNRRASFPKYGGVDGGCFDRHLIFSRGSGSGSGSGSDIVLTQSPASLAVSLGQRATISCRASESVDNYGFSFMNWFQQKPGQPPKLLIYATSNRGSGVPARFSGSGSGTDFSLNIHPVEEDDSAMYFCQQTKEVPWTFGGGTKLEIKRGGGGSGGGDSGGGGSEVKLVESGGDLVKPGGSLKLSCAASGFTFSHYGMSWVRQTPDKRLEWVATIGSRGTYTHYPDSVKGRFTISRDNDKNALYLQMNSLRTEDTAMYYCARKSEFYYYGNTYYYSAMDYWGQGASVTVSS

SEQ ID NO: 173 - protein, 316 aa, synthetic construct
  source 1..316: note = NLS-DCAF1-(GS)6-3DX.2 peptide
PAAKRVKLDGSGSGSQAPINFTSRLNRRASFPKYGGVDGGCFDRHLIFSRGSGSGSGSGSGSDIVLTQSPASLAVSLGQRATISCRASESVDNYGFSFMNWFQQKPGQPPKLLIYATSNRGSGVPARFSGSGSGTDFSLNIHPVEEDDSAMYFCQQTKEVPWTFGGGTKLEIKRGGGGSGGGDSGGGGSEVKLVESGGDLVKPGGSLKLSCAASGFTFSHYGMSWVRQTPDKRLEWVATIGSRGTYTHYPDSVKGRFTISRDNDKNALYLQMNSLRTEDTAMYYCARKSEFYYYGNTYYYSAMDYWGQGASVTVSS

SEQ ID NO: 174 - protein, 316 aa, synthetic construct
  source 1..316: note = HA-NLS-DCAF1-(GS)1-3DX.2 peptide
MYPYDVPDYAPAAKRVKLDGSGSGSQAPINFTSRLNRRASFPKYGGVDGGCFDRHLIFSRGSDIVLTQSPASLAVSLGQRATISCRASESVDNYGFSFMNWFQQKPGQPPKLLIYATSNRGSGVPARFSGSGSGTDFSLNIHPVEEDDSAMYFCQQTKEVPWTFGGGTKLEIKRGGGGSGGGDSGGGGSEVKLVESGGDLVKPGGSLKLSCAASGFTFSHYGMSWVRQTPDKRLEWVATIGSRGTYTHYPDSVKGRFTISRDNDKNALYLQMNSLRTEDTAMYYCARKSEFYYYGNTYYYSAMDYWGQGASVTVSS

SEQ ID NO: 175 - protein, 318 aa, synthetic construct
  source 1..318: note = HA-NLS-DCAF1-(GS)2-3DX.2 peptide
MYPYDVPDYAPAAKRVKLDGSGSGSQAPINFTSRLNRRASFPKYGGVDGGCFDRHLIFSRGSGSDIVLTQSPASLAVSLGQRATISCRASESVDNYGFSFMNWFQQKPGQPPKLLIYATSNRGSGVPARFSGSGSGTDFSLNIHPVEEDDSAMYFCQQTKEVPWTFGGGTKLEIKRGGGGSGGGDSGGGGSEVKLVESGGDLVKPGGSLKLSCAASGFTFSHYGMSWVRQTPDKRLEWVATIGSRGTYTHYPDSVKGRFTISRDNDKNALYLQMNSLRTEDTAMYYCARKSEFYYYGNTYYYSAMDYWGQGASVTVSS

SEQ ID NO: 176 - protein, 320 aa, synthetic construct
  source 1..320: note = HA-NLS-DCAF1-(GS)3-3DX.2 peptide
MYPYDVPDYAPAAKRVKLDGSGSGSQAPINFTSRLNRRASFPKYGGVDGGCFDRHLIFSRGSGSGSDIVLTQSPASLAVSLGQRATISCRASESVDNYGFSFMNWFQQKPGQPPKLLIYATSNRGSGVPARFSGSGSGTDFSLNIHPVEEDDSAMYFCQQTKEVPWTFGGGTKLEIKRGGGGSGGGDSGGGGSEVKLVESGGDLVKPGGSLKLSCAASGFTFSHYGMSWVRQTPDKRLEWVATIGSRGTYTHYPDSVKGRFTISRDNDKNALYLQMNSLRTEDTAMYYCARKSEFYYYGNTYYYSAMDYWGQGASVTVSS

SEQ ID NO: 177 - protein, 322 aa, synthetic construct
  source 1..322: note = HA-NLS-DCAF1-(GS)4-3DX.2 peptide
MYPYDVPDYAPAAKRVKLDGSGSGSQAPINFTSRLNRRASFPKYGGVDGGCFDRHLIFSRGSGSGSGSDIVLTQSPASLAVSLGQRATISCRASESVDNYGFSFMNWFQQKPGQPPKLLIYATSNRGSGVPARFSGSGSGTDFSLNIHPVEEDDSAMYFCQQTKEVPWTFGGGTKLEIKRGGGGSGGGDSGGGGSEVKLVESGGDLVKPGGSLKLSCAASGFTFSHYGMSWVRQTPDKRLEWVATIGSRGTYTHYPDSVKGRFTISRDNDKNALYLQMNSLRTEDTAMYYCARKSEFYYYGNTYYYSAMDYWGQGASVTVSS

SEQ ID NO: 178 - protein, 324 aa, synthetic construct
  source 1..324: note = HA-NLS-DCAF1-(GS)5-3DX.2 peptide
MYPYDVPDYAPAAKRVKLDGSGSGSQAPINFTSRLNRRASFPKYGGVDGGCFDRHLIFSRGSGSGSGSGSDIVLTQSPASLAVSLGQRATISCRASESVDNYGFSFMNWFQQKPGQPPKLLIYATSNRGSGVPARFSGSGSGTDFSLNIHPVEEDDSAMYFCQQTKEVPWTFGGGTKLEIKRGGGGSGGGDSGGGGSEVKLVESGGDLVKPGGSLKLSCAASGFTFSHYGMSWVRQTPDKRLEWVATIGSRGTYTHYPDSVKGRFTISRDNDKNALYLQMNSLRTEDTAMYYCARKSEFYYYGNTYYYSAMDYWGQGASVTVSS

SEQ ID NO: 179 - protein, 326 aa, synthetic construct
  source 1..326: note = HA-NLS-DCAF1-(GS)6-3DX.2 peptide
MYPYDVPDYAPAAKRVKLDGSGSGSQAPINFTSRLNRRASFPKYGGVDGGCFDRHLIFSRGSGSGSGSGSGSDIVLTQSPASLAVSLGQRATISCRASESVDNYGFSFMNWFQQKPGQPPKLLIYATSNRGSGVPARFSGSGSGTDFSLNIHPVEEDDSAMYFCQQTKEVPWTFGGGTKLEIKRGGGGSGGGDSGGGGSEVKLVESGGDLVKPGGSLKLSCAASGFTFSHYGMSWVRQTPDKRLEWVATIGSRGTYTHYPDSVKGRFTISRDNDKNALYLQMNSLRTEDTAMYYCARKSEFYYYGNTYYYSAMDYWGQGASVTVSS

SEQ ID NO: 180 - protein, 627 aa, synthetic construct
  source 1..627: note = NLS-3DX.2-(GS)1-E6AP peptide
PAAKRVKLDGSGSGSDIVLTQSPASLAVSLGQRATISCRASESVDNYGFSFMNWFQQKPGQPPKLLIYATSNRGSGVPARFSGSGSGTDFSLNIHPVEEDDSAMYFCQQTKEVPWTFGGGTKLEIKRGGGGSGGGDSGGGGSEVKLVESGGDLVKPGGSLKLSCAASGFTFSHYGMSWVRQTPDKRLEWVATIGSRGTYTHYPDSVKGRFTISRDNDKNALYLQMNSLRTEDTAMYYCARKSEFYYYGNTYYYSAMDYWGQGASVTVSSGSNPYLRLKVRRDHIIDDALVRLEMIAMENPADLKKQLYVEFEGEQGVDEGGVSKEFFQLVVEEIFNPDIGMFTYDESTKLFWFNPSSFETEGQFTLIGIVLGLAIYNNCILDVHFPMVVYRKLMGKKGTFRDLGDSHPVLYQSLKDLLEYEGNVEDDMMITFQISQTDLFGNPMMYDLKENGDKIPITNENRKEFVNLYSDYILNKSVEKQFKAFRRGFHMVTNESPLKYLFRPEEIELLICGSRNLDFQALEETTEYDGGYTRDSVLIREFWEIVHSFTDEQKRLFLQFTTGTDRAPVGGLGKLKMIIAKNGPDTERLPTSHTCFNVLLLPEYSSKEKLKERLLKAITYAKGFGML

SEQ ID NO: 181 - protein, 629 aa, synthetic construct
  source 1..629: note = NLS-3DX.2-(GS)2-E6AP peptide
PAAKRVKLDGSGSGSDIVLTQSPASLAVSLGQRATISCRASESVDNYGFSFMNWFQQKPGQPPKLLIYATSNRGSGVPARFSGSGSGTDFSLNIHPVEEDDSAMYFCQQTKEVPWTFGGGTKLEIKRGGGGSGGGDSGGGGSEVKLVESGGDLVKPGGSLKLSCAASGFTFSHYGMSWVRQTPDKRLEWVATIGSRGTYTHYPDSVKGRFTISRDNDKNALYLQMNSLRTEDTAMYYCARKSEFYYYGNTYYYSAMDYWGQGASVTVSSGSGSNPYLRLKVRRDHIIDDALVRLEMIAMENPADLKKQLYVEFEGEQGVDEGGVSKEFFQLVVEEIFNPDIGMFTYDESTKLFWFNPSSFETEGQFTLIGIVLGLAIYNNCILDVHFPMVVYRKLMGKKGTFRDLGDSHPVLYQSLKDLLEYEGNVEDDMMITFQISQTDLFGNPMMYDLKENGDKIPITNENRKEFVNLYSDYILNKSVEKQFKAFRRGFHMVTNESPLKYLFRPEEIELLICGSRNLDFQALEETTEYDGGYTRDSVLIREFWEIVHSFTDEQKRLFLQFTTGTDRAPVGGLGKLKMIIAKNGPDTERLPTSHTCFNVLLLPEYSSKEKLKERLLKAITYAKGFGML

SEQ ID NO: 182 - protein, 631 aa, synthetic construct
  source 1..631: note = NLS-3DX.2-(GS)3-E6AP peptide
PAAKRVKLDGSGSGSDIVLTQSPASLAVSLGQRATISCRASESVDNYGFSFMNWFQQKPGQPPKLLIYATSNRGSGVPARFSGSGSGTDFSLNIHPVEEDDSAMYFCQQTKEVPWTFGGGTKLEIKRGGGGSGGGDSGGGGSEVKLVESGGDLVKPGGSLKLSCAASGFTFSHYGMSWVRQTPDKRLEWVATIGSRGTYTHYPDSVKGRFTISRDNDKNALYLQMNSLRTEDTAMYYCARKSEFYYYGNTYYYSAMDYWGQGASVTVSSGSGSGSNPYLRLKVRRDHIIDDALVRLEMIAMENPADLKKQLYVEFEGEQGVDEGGVSKEFFQLVVEEIFNPDIGMFTYDESTKLFWFNPSSFETEGQFTLIGIVLGLAIYNNCILDVHFPMVVYRKLMGKKGTFRDLGDSHPVLYQSLKDLLEYEGNVEDDMMITFQISQTDLFGNPMMYDLKENGDKIPITNENRKEFVNLYSDYILNKSVEKQFKAFRRGFHMVTNESPLKYLFRPEEIELLICGSRNLDFQALEETTEYDGGYTRDSVLIREFWEIVHSFTDEQKRLFLQFTTGTDRAPVGGLGKLKMIIAKNGPDTERLPTSHTCFNVLLLPEYSSKEKLKERLLKAITYAKGFGML

SEQ ID NO: 183 - protein, 633 aa, synthetic construct
  source 1..633: note = NLS-3DX.2-(GS)4-E6AP peptide
PAAKRVKLDGSGSGSDIVLTQSPASLAVSLGQRATISCRASESVDNYGFSFMNWFQQKPGQPPKLLIYATSNRGSGVPARFSGSGSGTDFSLNIHPVEEDDSAMYFCQQTKEVPWTFGGGTKLEIKRGGGGSGGGDSGGGGSEVKLVESGGDLVKPGGSLKLSCAASGFTFSHYGMSWVRQTPDKRLEWVATIGSRGTYTHYPDSVKGRFTISRDNDKNALYLQMNSLRTEDTAMYYCARKSEFYYYGNTYYYSAMDYWGQGASVTVSSGSGSGSGSNPYLRLKVRRDHIIDDALVRLEMIAMENPADLKKQLYVEFEGEQGVDEGGVSKEFFQLVVEEIFNPDIGMFTYDESTKLFWFNPSSFETEGQFTLIGIVLGLAIYNNCILDVHFPMVVYRKLMGKKGTFRDLGDSHPVLYQSLKDLLEYEGNVEDDMMITFQISQTDLFGNPMMYDLKENGDKIPITNENRKEFVNLYSDYILNKSVEKQFKAFRRGFHMVTNESPLKYLFRPEEIELLICGSRNLDFQALEETTEYDGGYTRDSVLIREFWEIVHSFTDEQKRLFLQFTTGTDRAPVGGLGKLKMIIAKNGPDTERLPTSHTCFNVLLLPEYSSKEKLKERLLKAITYAKGFGML

SEQ ID NO: 184 - protein, 635 aa, synthetic construct
  source 1..635: note = NLS-3DX.2-(GS)5-E6AP peptide
PAAKRVKLDGSGSGSDIVLTQSPASLAVSLGQRATISCRASESVDNYGFSFMNWFQQKPGQPPKLLIYATSNRGSGVPARFSGSGSGTDFSLNIHPVEEDDSAMYFCQQTKEVPWTFGGGTKLEIKRGGGGSGGGDSGGGGSEVKLVESGGDLVKPGGSLKLSCAASGFTFSHYGMSWVRQTPDKRLEWVATIGSRGTYTHYPDSVKGRFTISRDNDKNALYLQMNSLRTEDTAMYYCARKSEFYYYGNTYYYSAMDYWGQGASVTVSSGSGSGSGSGSNPYLRLKVRRDHIIDDALVRLEMIAMENPADLKKQLYVEFEGEQGVDEGGVSKEFFQLVVEEIFNPDIGMFTYDESTKLFWFNPSSFETEGQFTLIGIVLGLAIYNNCILDVHFPMVVYRKLMGKKGTFRDLGDSHPVLYQSLKDLLEYEGNVEDDMMITFQISQTDLFGNPMMYDLKENGDKIPITNENRKEFVNLYSDYILNKSVEKQFKAFRRGFHMVTNESPLKYLFRPEEIELLICGSRNLDFQALEETTEYDGGYTRDSVLIREFWEIVHSFTDEQKRLFLQFTTGTDRAPVGGLGKLKMIIAKNGPDTERLPTSHTCFNVLLLPEYSSKEKLKERLLKAITYAKGFGML

SEQ ID NO: 185 - protein, 637 aa, synthetic construct
  source 1..637: note = NLS-3DX.2-(GS)6-E6AP peptide
PAAKRVKLDGSGSGSDIVLTQSPASLAVSLGQRATISCRASESVDNYGFSFMNWFQQKPGQPPKLLIYATSNRGSGVPARFSGSGSGTDFSLNIHPVEEDDSAMYFCQQTKEVPWTFGGGTKLEIKRGGGGSGGGDSGGGGSEVKLVESGGDLVKPGGSLKLSCAASGFTFSHYGMSWVRQTPDKRLEWVATIGSRGTYTHYPDSVKGRFTISRDNDKNALYLQMNSLRTEDTAMYYCARKSEFYYYGNTYYYSAMDYWGQGASVTVSSGSGSGSGSGSGSNPYLRLKVRRDHIIDDALVRLEMIAMENPADLKKQLYVEFEGEQGVDEGGVSKEFFQLVVEEIFNPDIGMFTYDESTKLFWFNPSSFETEGQFTLIGIVLGLAIYNNCILDVHFPMVVYRKLMGKKGTFRDLGDSHPVLYQSLKDLLEYEGNVEDDMMITFQISQTDLFGNPMMYDLKENGDKIPITNENRKEFVNLYSDYILNKSVEKQFKAFRRGFHMVTNESPLKYLFRPEEIELLICGSRNLDFQALEETTEYDGGYTRDSVLIREFWEIVHSFTDEQKRLFLQFTTGTDRAPVGGLGKLKMIIAKNGPDTERLPTSHTCFNVLLLPEYSSKEKLKERLLKAITYAKGFGML

SEQ ID NO: 186 - protein, 637 aa, synthetic construct
  source 1..637: note = HA-NLS-3DX.2-(GS)1-E6AP peptide
MYPYDVPDYAPAAKRVKLDGSGSGSDIVLTQSPASLAVSLGQRATISCRASESVDNYGFSFMNWFQQKPGQPPKLLIYATSNRGSGVPARFSGSGSGTDFSLNIHPVEEDDSAMYFCQQTKEVPWTFGGGTKLEIKRGGGGSGGGDSGGGGSEVKLVESGGDLVKPGGSLKLSCAASGFTFSHYGMSWVRQTPDKRLEWVATIGSRGTYTHYPDSVKGRFTISRDNDKNALYLQMNSLRTEDTAMYYCARKSEFYYYGNTYYYSAMDYWGQGASVTVSSGSNPYLRLKVRRDHIIDDALVRLEMIAMENPADLKKQLYVEFEGEQGVDEGGVSKEFFQLVVEEIFNPDIGMFTYDESTKLFWFNPSSFETEGQFTLIGIVLGLAIYNNCILDVHFPMVVYRKLMGKKGTFRDLGDSHPVLYQSLKDLLEYEGNVEDDMMITFQISQTDLFGNPMMYDLKENGDKIPITNENRKEFVNLYSDYILNKSVEKQFKAFRRGFHMVTNESPLKYLFRPEEIELLICGSRNLDFQALEETTEYDGGYTRDSVLIREFWEIVHSFTDEQKRLFLQFTTGTDRAPVGGLGKLKMIIAKNGPDTERLPTSHTCFNVLLLPEYSSKEKLKERLLKAITYAKGFGML

SEQ ID NO: 187 - protein, 639 aa, synthetic construct
  source 1..639: note = HA-NLS-3DX.2-(GS)2-E6AP peptide
MYPYDVPDYAPAAKRVKLDGSGSGSDIVLTQSPASLAVSLGQRATISCRASESVDNYGFSFMNWFQQKPGQPPKLLIYATSNRGSGVPARFSGSGSGTDFSLNIHPVEEDDSAMYFCQQTKEVPWTFGGGTKLEIKRGGGGSGGGDSGGGGSEVKLVESGGDLVKPGGSLKLSCAASGFTFSHYGMSWVRQTPDKRLEWVATIGSRGTYTHYPDSVKGRFTISRDNDKNALYLQMNSLRTEDTAMYYCARKSEFYYYGNTYYYSAMDYWGQGASVTVSSGSGSNPYLRLKVRRDHIIDDALVRLEMIAMENPADLKKQLYVEFEGEQGVDEGGVSKEFFQLVVEEIFNPDIGMFTYDESTKLFWFNPSSFETEGQFTLIGIVLGLAIYNNCILDVHFPMVVYRKLMGKKGTFRDLGDSHPVLYQSLKDLLEYEGNVEDDMMITFQISQTDLFGNPMMYDLKENGDKIPITNENRKEFVNLYSDYILNKSVEKQFKAFRRGFHMVTNESPLKYLFRPEEIELLICGSRNLDFQALEETTEYDGGYTRDSVLIREFWEIVHSFTDEQKRLFLQFTTGTDRAPVGGLGKLKMIIAKNGPDTERLPTSHTCFNVLLLPEYSSKEKLKERLLKAITYAKGFGML

SEQ ID NO: 188 - protein, 641 aa, synthetic construct
  source 1..641: note = HA-NLS-3DX.2-(GS)3-E6AP peptide
MYPYDVPDYAPAAKRVKLDGSGSGSDIVLTQSPASLAVSLGQRATISCRASESVDNYGFSFMNWFQQKPGQPPKLLIYATSNRGSGVPARFSGSGSGTDFSLNIHPVEEDDSAMYFCQQTKEVPWTFGGGTKLEIKRGGGGSGGGDSGGGGSEVKLVESGGDLVKPGGSLKLSCAASGFTFSHYGMSWVRQTPDKRLEWVATIGSRGTYTHYPDSVKGRFTISRDNDKNALYLQMNSLRTEDTAMYYCARKSEFYYYGNTYYYSAMDYWGQGASVTVSSGSGSGSNPYLRLKVRRDHIIDDALVRLEMIAMENPADLKKQLYVEFEGEQGVDEGGVSKEFFQLVVEEIFNPDIGMFTYDESTKLFWFNPSSFETEGQFTLIGIVLGLAIYNNCILDVHFPMVVYRKLMGKKGTFRDLGDSHPVLYQSLKDLLEYEGNVEDDMMITFQISQTDLFGNPMMYDLKENGDKIPITNENRKEFVNLYSDYILNKSVEKQFKAFRRGFHMVTNESPLKYLFRPEEIELLICGSRNLDFQALEETTEYDGGYTRDSVLIREFWEIVHSFTDEQKRLFLQFTTGTDRAPVGGLGKLKMIIAKNGPDTERLPTSHTCFNVLLLPEYSSKEKLKERLLKAITYAKGFGML

SEQ ID NO: 189 - protein, 643 aa, synthetic construct
  source 1..643: note = HA-NLS-3DX.2-(GS)4-E6AP peptide
MYPYDVPDYAPAAKRVKLDGSGSGSDIVLTQSPASLAVSLGQRATISCRASESVDNYGFSFMNWFQQKPGQPPKLLIYATSNRGSGVPARFSGSGSGTDFSLNIHPVEEDDSAMYFCQQTKEVPWTFGGGTKLEIKRGGGGSGGGDSGGGGSEVKLVESGGDLVKPGGSLKLSCAASGFTFSHYGMSWVRQTPDKRLEWVATIGSRGTYTHYPDSVKGRFTISRDNDKNALYLQMNSLRTEDTAMYYCARKSEFYYYGNTYYYSAMDYWGQGASVTVSSGSGSGSGSNPYLRLKVRRDHIIDDALVRLEMIAMENPADLKKQLYVEFEGEQGVDEGGVSKEFFQLVVEEIFNPDIGMFTYDESTKLFWFNPSSFETEGQFTLIGIVLGLAIYNNCILDVHFPMVVYRKLMGKKGTFRDLGDSHPVLYQSLKDLLEYEGNVEDDMMITFQISQTDLFGNPMMYDLKENGDKIPITNENRKEFVNLYSDYILNKSVEKQFKAFRRGFHMVTNESPLKYLFRPEEIELLICGSRNLDFQALEETTEYDGGYTRDSVLIREFWEIVHSFTDEQKRLFLQFTTGTDRAPVGGLGKLKMIIAKNGPDTERLPTSHTCFNVLLLPEYSSKEKLKERLLKAITYAKGFGML

SEQ ID NO: 190 - protein, 645 aa, synthetic construct
  source 1..645: note = HA-NLS-3DX.2-(GS)5-E6AP peptide
MYPYDVPDYAPAAKRVKLDGSGSGSDIVLTQSPASLAVSLGQRATISCRASESVDNYGFSFMNWFQQKPGQPPKLLIYATSNRGSGVPARFSGSGSGTDFSLNIHPVEEDDSAMYFCQQTKEVPWTFGGGTKLEIKRGGGGSGGGDSGGGGSEVKLVESGGDLVKPGGSLKLSCAASGFTFSHYGMSWVRQTPDKRLEWVATIGSRGTYTHYPDSVKGRFTISRDNDKNALYLQMNSLRTEDTAMYYCARKSEFYYYGNTYYYSAMDYWGQGASVTVSSGSGSGSGSGSNPYLRLKVRRDHIIDDALVRLEMIAMENPADLKKQLYVEFEGEQGVDEGGVSKEFFQLVVEEIFNPDIGMFTYDESTKLFWFNPSSFETEGQFTLIGIVLGLAIYNNCILDVHFPMVVYRKLMGKKGTFRDLGDSHPVLYQSLKDLLEYEGNVEDDMMITFQISQTDLFGNPMMYDLKENGDKIPITNENRKEFVNLYSDYILNKSVEKQFKAFRRGFHMVTNESPLKYLFRPEEIELLICGSRNLDFQALEETTEYDGGYTRDSVLIREFWEIVHSFTDEQKRLFLQFTTGTDRAPVGGLGKLKMIIAKNGPDTERLPTSHTCFNVLLLPEYSSKEKLKERLLKAITYAKGFGML

SEQ ID NO: 191 - protein, 647 aa, synthetic construct
  source 1..647: note = HA-NLS-3DX.2-(GS)6-E6AP peptide
MYPYDVPDYAPAAKRVKLDGSGSGSDIVLTQSPASLAVSLGQRATISCRASESVDNYGFSFMNWFQQKPGQPPKLLIYATSNRGSGVPARFSGSGSGTDFSLNIHPVEEDDSAMYFCQQTKEVPWTFGGGTKLEIKRGGGGSGGGDSGGGGSEVKLVESGGDLVKPGGSLKLSCAASGFTFSHYGMSWVRQTPDKRLEWVATIGSRGTYTHYPDSVKGRFTISRDNDKNALYLQMNSLRTEDTAMYYCARKSEFYYYGNTYYYSAMDYWGQGASVTVSSGSGSGSGSGSGSNPYLRLKVRRDHIIDDALVRLEMIAMENPADLKKQLYVEFEGEQGVDEGGVSKEFFQLVVEEIFNPDIGMFTYDESTKLFWFNPSSFETEGQFTLIGIVLGLAIYNNCILDVHFPMVVYRKLMGKKGTFRDLGDSHPVLYQSLKDLLEYEGNVEDDMMITFQISQTDLFGNPMMYDLKENGDKIPITNENRKEFVNLYSDYILNKSVEKQFKAFRRGFHMVTNESPLKYLFRPEEIELLICGSRNLDFQALEETTEYDGGYTRDSVLIREFWEIVHSFTDEQKRLFLQFTTGTDRAPVGGLGKLKMIIAKNGPDTERLPTSHTCFNVLLLPEYSSKEKLKERLLKAITYAKGFGML

SEQ ID NO: 192 - protein, 623 aa, synthetic construct
  source 1..623: note = FBXW7a-(GS)1-3DX.2 peptide
NQELLSVGSKRRRTGGSLRGNPSSSQVDEEQMNRVVEEEQQQQLRQQEEEHTARNGEVVGVEPRPGGQNDSQQGQLEENNNRFISVDEDSSGNQEEQEEDEEHAGEQDEEDEEEEEMDQESDDFDQSDDSSREDEHTHTNSVTNSSSIVDLPVHQLSSPFYTKTTKMKRKLDHGSEVRSFSLGKKPCKVSEYTSTTGLVPCSATPTTFGDLRAANGQGQQRRRITSVQPPTGLQEWLKMFQSWSGPEKLLALDELIDSCEPTQVKHMMQVIEPQFQRDFISLLPKELALYVLSFLEPKDLLQAAQTCRYWRILAEDNLLWREKCKEEGIDEPLHIKRRKVIKPGFIHSPWKSAYIRQHRIDTNSRRGGSDIVLTQSPASLAVSLGQRATISCRASESVDNYGFSFMNWFQQKPGQPPKLLIYATSNRGSGVPARFSGSGSGTDFSLNIHPVEEDDSAMYFCQQTKEVPWTFGGGTKLEIKRGGGGSGGGDSGGGGSEVKLVESGGDLVKPGGSLKLSCAASGFTFSHYGMSWVRQTPDKRLEWVATIGSRGTYTHYPDSVKGRFTISRDNDKNALYLQMNSLRTEDTAMYYCARKSEFYYYGNTYYYSAMDYWGQGASVTVSS

SEQ ID NO: 193 - protein, 625 aa, synthetic construct
  source 1..625: note = FBXW7a-(GS)2-3DX.2 peptide
NQELLSVGSKRRRTGGSLRGNPSSSQVDEEQMNRVVEEEQQQQLRQQEEEHTARNGEVVGVEPRPGGQNDSQQGQLEENNNRFISVDEDSSGNQEEQEEDEEHAGEQDEEDEEEEEMDQESDDFDQSDDSSREDEHTHTNSVTNSSSIVDLPVHQLSSPFYTKTTKMKRKLDHGSEVRSFSLGKKPCKVSEYTSTTGLVPCSATPTTFGDLRAANGQGQQRRRITSVQPPTGLQEWLKMFQSWSGPEKLLALDELIDSCEPTQVKHMMQVIEPQFQRDFISLLPKELALYVLSFLEPKDLLQAAQTCRYWRILAEDNLLWREKCKEEGIDEPLHIKRRKVIKPGFIHSPWKSAYIRQHRIDTNSRRGGSGSDIVLTQSPASLAVSLGQRATISCRASESVDNYGFSFMNWFQQKPGQPPKLLIYATSNRGSGVPARFSGSGSGTDFSLNIHPVEEDDSAMYFCQQTKEVPWTFGGGTKLEIKRGGGGSGGGDSGGGGSEVKLVESGGDLVKPGGSLKLSCAASGFTFSHYGMSWVRQTPDKRLEWVATIGSRGTYTHYPDSVKGRFTISRDNDKNALYLQMNSLRTEDTAMYYCARKSEFYYYGNTYYYSAMDYWGQGASVTVSS

SEQ ID NO: 194 - protein, 627 aa, synthetic construct
  source 1..627: note = FBXW7a-(GS)3-3DX.2 peptide
NQELLSVGSKRRRTGGSLRGNPSSSQVDEEQMNRVVEEEQQQQLRQQEEEHTARNGEVVGVEPRPGGQNDSQQGQLEENNNRFISVDEDSSGNQEEQEEDEEHAGEQDEEDEEEEEMDQESDDFDQSDDSSREDEHTHTNSVTNSSSIVDLPVHQLSSPFYTKTTKMKRKLDHGSEVRSFSLGKKPCKVSEYTSTTGLVPCSATPTTFGDLRAANGQGQQRRRITSVQPPTGLQEWLKMFQSWSGPEKLLALDELIDSCEPTQVKHMMQVIEPQFQRDFISLLPKELALYVLSFLEPKDLLQAAQTCRYWRILAEDNLLWREKCKEEGIDEPLHIKRRKVIKPGFIHSPWKSAYIRQHRIDTNSRRGGSGSGSDIVLTQSPASLAVSLGQRATISCRASESVDNYGFSFMNWFQQKPGQPPKLLIYATSNRGSGVPARFSGSGSGTDFSLNIHPVEEDDSAMYFCQQTKEVPWTFGGGTKLEIKRGGGGSGGGDSGGGGSEVKLVESGGDLVKPGGSLKLSCAASGFTFSHYGMSWVRQTPDKRLEWVATIGSRGTYTHYPDSVKGRFTISRDNDKNALYLQMNSLRTEDTAMYYCARKSEFYYYGNTYYYSAMDYWGQGASVTVSS

SEQ ID NO: 195 - protein, 629 aa, synthetic construct
  source 1..629: note = FBXW7a-(GS)4-3DX.2 peptide
NQELLSVGSKRRRTGGSLRGNPSSSQVDEEQMNRVVEEEQQQQLRQQEEEHTARNGEVVGVEPRPGGQNDSQQGQLEENNNRFISVDEDSSGNQEEQEEDEEHAGEQDEEDEEEEEMDQESDDFDQSDDSSREDEHTHTNSVTNSSSIVDLPVHQLSSPFYTKTTKMKRKLDHGSEVRSFSLGKKPCKVSEYTSTTGLVPCSATPTTFGDLRAANGQGQQRRRITSVQPPTGLQEWLKMFQSWSGPEKLLALDELIDSCEPTQVKHMMQVIEPQFQRDFISLLPKELALYVLSFLEPKDLLQAAQTCRYWRILAEDNLLWREKCKEEGIDEPLHIKRRKVIKPGFIHSPWKSAYIRQHRIDTNSRRGGSGSGSGSDIVLTQSPASLAVSLGQRATISCRASESVDNYGFSFMNWFQQKPGQPPKLLIYATSNRGSGVPARFSGSGSGTDFSLNIHPVEEDDSAMYFCQQTKEVPWTFGGGTKLEIKRGGGGSGGGDSGGGGSEVKLVESGGDLVKPGGSLKLSCAASGFTFSHYGMSWVRQTPDKRLEWVATIGSRGTYTHYPDSVKGRFTISRDNDKNALYLQMNSLRTEDTAMYYCARKSEFYYYGNTYYYSAMDYWGQGASVTVSS

SEQ ID NO: 196 - protein, 631 aa, synthetic construct
  source 1..631: note = FBXW7a-(GS)5-3DX.2 peptide
NQELLSVGSKRRRTGGSLRGNPSSSQVDEEQMNRVVEEEQQQQLRQQEEEHTARNGEVVGVEPRPGGQNDSQQGQLEENNNRFISVDEDSSGNQEEQEEDEEHAGEQDEEDEEEEEMDQESDDFDQSDDSSREDEHTHTNSVTNSSSIVDLPVHQLSSPFYTKTTKMKRKLDHGSEVRSFSLGKKPCKVSEYTSTTGLVPCSATPTTFGDLRAANGQGQQRRRITSVQPPTGLQEWLKMFQSWSGPEKLLALDELIDSCEPTQVKHMMQVIEPQFQRDFISLLPKELALYVLSFLEPKDLLQAAQTCRYWRILAEDNLLWREKCKEEGIDEPLHIKRRKVIKPGFIHSPWKSAYIRQHRIDTNSRRGGSGSGSGSGSDIVLTQSPASLAVSLGQRATISCRASESVDNYGFSFMNWFQQKPGQPPKLLIYATSNRGSGVPARFSGSGSGTDFSLNIHPVEEDDSAMYFCQQTKEVPWTFGGGTKLEIKRGGGGSGGGDSGGGGSEVKLVESGGDLVKPGGSLKLSCAASGFTFSHYGMSWVRQTPDKRLEWVATIGSRGTYTHYPDSVKGRFTISRDNDKNALYLQMNSLRTEDTAMYYCARKSEFYYYGNTYYYSAMDYWGQGASVTVSS

SEQ ID NO: 197 - protein, 633 aa, synthetic construct
  source 1..633: note = FBXW7a-(GS)6-3DX.2 peptide
NQELLSVGSKRRRTGGSLRGNPSSSQVDEEQMNRVVEEEQQQQLRQQEEEHTARNGEVVGVEPRPGGQNDSQQGQLEENNNRFISVDEDSSGNQEEQEEDEEHAGEQDEEDEEEEEMDQESDDFDQSDDSSREDEHTHTNSVTNSSSIVDLPVHQLSSPFYTKTTKMKRKLDHGSEVRSFSLGKKPCKVSEYTSTTGLVPCSATPTTFGDLRAANGQGQQRRRITSVQPPTGLQEWLKMFQSWSGPEKLLALDELIDSCEPTQVKHMMQVIEPQFQRDFISLLPKELALYVLSFLEPKDLLQAAQTCRYWRILAEDNLLWREKCKEEGIDEPLHIKRRKVIKPGFIHSPWKSAYIRQHRIDTNSRRGGSGSGSGSGSGSDIVLTQSPASLAVSLGQRATISCRASESVDNYGFSFMNWFQQKPGQPPKLLIYATSNRGSGVPARFSGSGSGTDFSLNIHPVEEDDSAMYFCQQTKEVPWTFGGGTKLEIKRGGGGSGGGDSGGGGSEVKLVESGGDLVKPGGSLKLSCAASGFTFSHYGMSWVRQTPDKRLEWVATIGSRGTYTHYPDSVKGRFTISRDNDKNALYLQMNSLRTEDTAMYYCARKSEFYYYGNTYYYSAMDYWGQGASVTVSS

SEQ ID NO: 198 - protein, 633 aa, synthetic construct
  source 1..633: note = HA-FBXW7a-(GS)1-3DX.2 peptide
MYPYDVPDYANQELLSVGSKRRRTGGSLRGNPSSSQVDEEQMNRVVEEEQQQQLRQQEEEHTARNGEVVGVEPRPGGQNDSQQGQLEENNNRFISVDEDSSGNQEEQEEDEEHAGEQDEEDEEEEEMDQESDDFDQSDDSSREDEHTHTNSVTNSSSIVDLPVHQLSSPFYTKTTKMKRKLDHGSEVRSFSLGKKPCKVSEYTSTTGLVPCSATPTTFGDLRAANGQGQQRRRITSVQPPTGLQEWLKMFQSWSGPEKLLALDELIDSCEPTQVKHMMQVIEPQFQRDFISLLPKELALYVLSFLEPKDLLQAAQTCRYWRILAEDNLLWREKCKEEGIDEPLHIKRRKVIKPGFIHSPWKSAYIRQHRIDTNSRRGGSDIVLTQSPASLAVSLGQRATISCRASESVDNYGFSFMNWFQQKPGQPPKLLIYATSNRGSGVPARFSGSGSGTDFSLNIHPVEEDDSAMYFCQQTKEVPWTFGGGTKLEIKRGGGGSGGGDSGGGGSEVKLVESGGDLVKPGGSLKLSCAASGFTFSHYGMSWVRQTPDKRLEWVATIGSRGTYTHYPDSVKGRFTISRDNDKNALYLQMNSLRTEDTAMYYCARKSEFYYYGNTYYYSAMDYWGQGASVTVSS

SEQ ID NO: 199 - protein, 635 aa, synthetic construct
  source 1..635: note = HA-FBXW7a-(GS)2-3DX.2 peptide
MYPYDVPDYANQELLSVGSKRRRTGGSLRGNPSSSQVDEEQMNRVVEEEQQQQLRQQEEEHTARNGEVVGVEPRPGGQNDSQQGQLEENNNRFISVDEDSSGNQEEQEEDEEHAGEQDEEDEEEEEMDQESDDFDQSDDSSREDEHTHTNSVTNSSSIVDLPVHQLSSPFYTKTTKMKRKLDHGSEVRSFSLGKKPCKVSEYTSTTGLVPCSATPTTFGDLRAANGQGQQRRRITSVQPPTGLQEWLKMFQSWSGPEKLLALDELIDSCEPTQVKHMMQVIEPQFQRDFISLLPKELALYVLSFLEPKDLLQAAQTCRYWRILAEDNLLWREKCKEEGIDEPLHIKRRKVIKPGFIHSPWKSAYIRQHRIDTNSRRGGSGSDIVLTQSPASLAVSLGQRATISCRASESVDNYGFSFMNWFQQKPGQPPKLLIYATSNRGSGVPARFSGSGSGTDFSLNIHPVEEDDSAMYFCQQTKEVPWTFGGGTKLEIKRGGGGSGGGDSGGGGSEVKLVESGGDLVKPGGSLKLSCAASGFTFSHYGMSWVRQTPDKRLEWVATIGSRGTYTHYPDSVKGRFTISRDNDKNALYLQMNSLRTEDTAMYYCARKSEFYYYGNTYYYSAMDYWGQGASVTVSS

SEQ ID NO: 200 - protein, 637 aa, synthetic construct
  source 1..637: note = HA-FBXW7a-(GS)3-3DX.2 peptide
MYPYDVPDYANQELLSVGSKRRRTGGSLRGNPSSSQVDEEQMNRVVEEEQQQQLRQQEEEHTARNGEVVGVEPRPGGQNDSQQGQLEENNNRFISVDEDSSGNQEEQEEDEEHAGEQDEEDEEEEEMDQESDDFDQSDDSSREDEHTHTNSVTNSSSIVDLPVHQLSSPFYTKTTKMKRKLDHGSEVRSFSLGKKPCKVSEYTSTTGLVPCSATPTTFGDLRAANGQGQQRRRITSVQPPTGLQEWLKMFQSWSGPEKLLALDELIDSCEPTQVKHMMQVIEPQFQRDFISLLPKELALYVLSFLEPKDLLQAAQTCRYWRILAEDNLLWREKCKEEGIDEPLHIKRRKVIKPGFIHSPWKSAYIRQHRIDTNSRRGGSGSGSDIVLTQSPASLAVSLGQRATISCRASESVDNYGFSFMNWFQQKPGQPPKLLIYATSNRGSGVPARFSGSGSGTDFSLNIHPVEEDDSAMYFCQQTKEVPWTFGGGTKLEIKRGGGGSGGGDSGGGGSEVKLVESGGDLVKPGGSLKLSCAASGFTFSHYGMSWVRQTPDKRLEWVATIGSRGTYTHYPDSVKGRFTISRDNDKNALYLQMNSLRTEDTAMYYCARKSEFYYYGNTYYYSAMDYWGQGASVTVSS

SEQ ID NO: 201 - protein, 639 aa, synthetic construct
  source 1..639: note = HA-FBXW7a-(GS)4-3DX.2 peptide
MYPYDVPDYANQELLSVGSKRRRTGGSLRGNPSSSQVDEEQMNRVVEEEQQQQLRQQEEEHTARNGEVVGVEPRPGGQNDSQQGQLEENNNRFISVDEDSSGNQEEQEEDEEHAGEQDEEDEEEEEMDQESDDFDQSDDSSREDEHTHTNSVTNSSSIVDLPVHQLSSPFYTKTTKMKRKLDHGSEVRSFSLGKKPCKVSEYTSTTGLVPCSATPTTFGDLRAANGQGQQRRRITSVQPPTGLQEWLKMFQSWSGPEKLLALDELIDSCEPTQVKHMMQVIEPQFQRDFISLLPKELALYVLSFLEPKDLLQAAQTCRYWRILAEDNLLWREKCKEEGIDEPLHIKRRKVIKPGFIHSPWKSAYIRQHRIDTNSRRGGSGSGSGSDIVLTQSPASLAVSLGQRATISCRASESVDNYGFSFMNWFQQKPGQPPKLLIYATSNRGSGVPARFSGSGSGTDFSLNIHPVEEDDSAMYFCQQTKEVPWTFGGGTKLEIKRGGGGSGGGDSGGGGSEVKLVESGGDLVKPGGSLKLSCAASGFTFSHYGMSWVRQTPDKRLEWVATIGSRGTYTHYPDSVKGRFTISRDNDKNALYLQMNSLRTEDTAMYYCARKSEFYYYGNTYYYSAMDYWGQGASVTVSS

SEQ ID NO: 202 - protein, 641 aa, synthetic construct
  source 1..641: note = HA-FBXW7a-(GS)5-3DX.2 peptide
MYPYDVPDYANQELLSVGSKRRRTGGSLRGNPSSSQVDEEQMNRVVEEEQQQQLRQQEEEHTARNGEVVGVEPRPGGQNDSQQGQLEENNNRFISVDEDSSGNQEEQEEDEEHAGEQDEEDEEEEEMDQESDDFDQSDDSSREDEHTHTNSVTNSSSIVDLPVHQLSSPFYTKTTKMKRKLDHGSEVRSFSLGKKPCKVSEYTSTTGLVPCSATPTTFGDLRAANGQGQQRRRITSVQPPTGLQEWLKMFQSWSGPEKLLALDELIDSCEPTQVKHMMQVIEPQFQRDFISLLPKELALYVLSFLEPKDLLQAAQTCRYWRILAEDNLLWREKCKEEGIDEPLHIKRRKVIKPGFIHSPWKSAYIRQHRIDTNSRRGGSGSGSGSGSDIVLTQSPASLAVSLGQRATISCRASESVDNYGFSFMNWFQQKPGQPPKLLIYATSNRGSGVPARFSGSGSGTDFSLNIHPVEEDDSAMYFCQQTKEVPWTFGGGTKLEIKRGGGGSGGGDSGGGGSEVKLVESGGDLVKPGGSLKLSCAASGFTFSHYGMSWVRQTPDKRLEWVATIGSRGTYTHYPDSVKGRFTISRDNDKNALYLQMNSLRTEDTAMYYCARKSEFYYYGNTYYYSAMDYWGQGASVTVSS

SEQ ID NO: 203 - protein, 643 aa, synthetic construct
  source 1..643: note = HA-FBXW7a-(GS)6-3DX.2 peptide
MYPYDVPDYANQELLSVGSKRRRTGGSLRGNPSSSQVDEEQMNRVVEEEQQQQLRQQEEEHTARNGEVVGVEPRPGGQNDSQQGQLEENNNRFISVDEDSSGNQEEQEEDEEHAGEQDEEDEEEEEMDQESDDFDQSDDSSREDEHTHTNSVTNSSSIVDLPVHQLSSPFYTKTTKMKRKLDHGSEVRSFSLGKKPCKVSEYTSTTGLVPCSATPTTFGDLRAANGQGQQRRRITSVQPPTGLQEWLKMFQSWSGPEKLLALDELIDSCEPTQVKHMMQVIEPQFQRDFISLLPKELALYVLSFLEPKDLLQAAQTCRYWRILAEDNLLWREKCKEEGIDEPLHIKRRKVIKPGFIHSPWKSAYIRQHRIDTNSRRGGSGSGSGSGSGSDIVLTQSPASLAVSLGQRATISCRASESVDNYGFSFMNWFQQKPGQPPKLLIYATSNRGSGVPARFSGSGSGTDFSLNIHPVEEDDSAMYFCQQTKEVPWTFGGGTKLEIKRGGGGSGGGDSGGGGSEVKLVESGGDLVKPGGSLKLSCAASGFTFSHYGMSWVRQTPDKRLEWVATIGSRGTYTHYPDSVKGRFTISRDNDKNALYLQMNSLRTEDTAMYYCARKSEFYYYGNTYYYSAMDYWGQGASVTVSS

SEQ ID NO: 204 - protein, 592 aa, synthetic construct
  source 1..592: note = NLS-Keap1-(GS)1-3DX.2 peptide
PAAKRVKLDGSGSGSQPDPRPSGAGACCRFLPLQSQCPEGAGDAVMYASTECKAEVTPSQHGNRTFSYTLEDHTKQAFGIMNELRLSQQLCDVTLQVKYQDAPAAQFMAHKVVLASSSPVFKAMFTNGLREQGMEVVSIEGIHPKVMERLIEFAYTASISMGEKCVLHVMNGAVMYQIDSVVRACSDFLVQQLDPSNAIGIANFAEQIGCVELHQRAREYIYMHFGEVAKQEEFFNLSHCQLVTLISRDDLNVRCESEVFHACINWVKYDCEQRRFYVQALLRAVRCHSLTPNFLQMQLQKCEILQSDSRCKDYLVKIFEELTLHKPTQVMPCRAPGSDIVLTQSPASLAVSLGQRATISCRASESVDNYGFSFMNWFQQKPGQPPKLLIYATSNRGSGVPARFSGSGSGTDFSLNIHPVEEDDSAMYFCQQTKEVPWTFGGGTKLEIKRGGGGSGGGDSGGGGSEVKLVESGGDLVKPGGSLKLSCAASGFTFSHYGMSWVRQTPDKRLEWVATIGSRGTYTHYPDSVKGRFTISRDNDKNALYLQMNSLRTEDTAMYYCARKSEFYYYGNTYYYSAMDYWGQGASVTVSS

SEQ ID NO: 205 - protein, 594 aa, synthetic construct
  source 1..594: note = NLS-Keap1-(GS)2-3DX.2 peptide
PAAKRVKLDGSGSGSQPDPRPSGAGACCRFLPLQSQCPEGAGDAVMYASTECKAEVTPSQHGNRTFSYTLEDHTKQAFGIMNELRLSQQLCDVTLQVKYQDAPAAQFMAHKVVLASSSPVFKAMFTNGLREQGMEVVSIEGIHPKVMERLIEFAYTASISMGEKCVLHVMNGAVMYQIDSVVRACSDFLVQQLDPSNAIGIANFAEQIGCVELHQRAREYIYMHFGEVAKQEEFFNLSHCQLVTLISRDDLNVRCESEVFHACINWVKYDCEQRRFYVQALLRAVRCHSLTPNFLQMQLQKCEILQSDSRCKDYLVKIFEELTLHKPTQVMPCRAPGSGSDIVLTQSPASLAVSLGQRATISCRASESVDNYGFSFMNWFQQKPGQPPKLLIYATSNRGSGVPARFSGSGSGTDFSLNIHPVEEDDSAMYFCQQTKEVPWTFGGGTKLEIKRGGGGSGGGDSGGGGSEVKLVESGGDLVKPGGSLKLSCAASGFTFSHYGMSWVRQTPDKRLEWVATIGSRGTYTHYPDSVKGRFTISRDNDKNALYLQMNSLRTEDTAMYYCARKSEFYYYGNTYYYSAMDYWGQGASVTVSS

SEQ ID NO: 206 - protein, 596 aa, synthetic construct
  source 1..596: note = NLS-Keap1-(GS)3-3DX.2 peptide
PAAKRVKLDGSGSGSQPDPRPSGAGACCRFLPLQSQCPEGAGDAVMYASTECKAEVTPSQHGNRTFSYTLEDHTKQAFGIMNELRLSQQLCDVTLQVKYQDAPAAQFMAHKVVLASSSPVFKAMFTNGLREQGMEVVSIEGIHPKVMERLIEFAYTASISMGEKCVLHVMNGAVMYQIDSVVRACSDFLVQQLDPSNAIGIANFAEQIGCVELHQRAREYIYMHFGEVAKQEEFFNLSHCQLVTLISRDDLNVRCESEVFHACINWVKYDCEQRRFYVQALLRAVRCHSLTPNFLQMQLQKCEILQSDSRCKDYLVKIFEELTLHKPTQVMPCRAPGSGSGSDIVLTQSPASLAVSLGQRATISCRASESVDNYGFSFMNWFQQKPGQPPKLLIYATSNRGSGVPARFSGSGSGTDFSLNIHPVEEDDSAMYFCQQTKEVPWTFGGGTKLEIKRGGGGSGGGDSGGGGSEVKLVESGGDLVKPGGSLKLSCAASGFTFSHYGMSWVRQTPDKRLEWVATIGSRGTYTHYPDSVKGRFTISRDNDKNALYLQMNSLRTEDTAMYYCARKSEFYYYGNTYYYSAMDYWGQGASVTVSS

SEQ ID NO: 207 - protein, 598 aa, synthetic construct
  source 1..598: note = NLS-Keap1-(GS)4-3DX.2 peptide
PAAKRVKLDGSGSGSQPDPRPSGAGACCRFLPLQSQCPEGAGDAVMYASTECKAEVTPSQHGNRTFSYTLEDHTKQAFGIMNELRLSQQLCDVTLQVKYQDAPAAQFMAHKVVLASSSPVFKAMFTNGLREQGMEVVSIEGIHPKVMERLIEFAYTASISMGEKCVLHVMNGAVMYQIDSVVRACSDFLVQQLDPSNAIGIANFAEQIGCVELHQRAREYIYMHFGEVAKQEEFFNLSHCQLVTLISRDDLNVRCESEVFHACINWVKYDCEQRRFYVQALLRAVRCHSLTPNFLQMQLQKCEILQSDSRCKDYLVKIFEELTLHKPTQVMPCRAPGSGSGSGSDIVLTQSPASLAVSLGQRATISCRASESVDNYGFSFMNWFQQKPGQPPKLLIYATSNRGSGVPARFSGSGSGTDFSLNIHPVEEDDSAMYFCQQTKEVPWTFGGGTKLEIKRGGGGSGGGDSGGGGSEVKLVESGGDLVKPGGSLKLSCAASGFTFSHYGMSWVRQTPDKRLEWVATIGSRGTYTHYPDSVKGRFTISRDNDKNALYLQMNSLRTEDTAMYYCARKSEFYYYGNTYYYSAMDYWGQGASVTVSS

SEQ ID NO: 208 - protein, 600 aa, synthetic construct
  source 1..600: note = NLS-Keap1-(GS)5-3DX.2 peptide
PAAKRVKLDGSGSGSQPDPRPSGAGACCRFLPLQSQCPEGAGDAVMYASTECKAEVTPSQHGNRTFSYTLEDHTKQAFGIMNELRLSQQLCDVTLQVKYQDAPAAQFMAHKVVLASSSPVFKAMFTNGLREQGMEVVSIEGIHPKVMERLIEFAYTASISMGEKCVLHVMNGAVMYQIDSVVRACSDFLVQQLDPSNAIGIANFAEQIGCVELHQRAREYIYMHFGEVAKQEEFFNLSHCQLVTLISRDDLNVRCESEVFHACINWVKYDCEQRRFYVQALLRAVRCHSLTPNFLQMQLQKCEILQSDSRCKDYLVKIFEELTLHKPTQVMPCRAPGSGSGSGSGSDIVLTQSPASLAVSLGQRATISCRASESVDNYGFSFMNWFQQKPGQPPKLLIYATSNRGSGVPARFSGSGSGTDFSLNIHPVEEDDSAMYFCQQTKEVPWTFGGGTKLEIKRGGGGSGGGDSGGGGSEVKLVESGGDLVKPGGSLKLSCAASGFTFSHYGMSWVRQTPDKRLEWVATIGSRGTYTHYPDSVKGRFTISRDNDKNALYLQMNSLRTEDTAMYYCARKSEFYYYGNTYYYSAMDYWGQGASVTVSS

SEQ ID NO: 209 - protein, 602 aa, synthetic construct
  source 1..602: note = NLS-Keap1-(GS)6-3DX.2 peptide
PAAKRVKLDGSGSGSQPDPRPSGAGACCRFLPLQSQCPEGAGDAVMYASTECKAEVTPSQHGNRTFSYTLEDHTKQAFGIMNELRLSQQLCDVTLQVKYQDAPAAQFMAHKVVLASSSPVFKAMFTNGLREQGMEVVSIEGIHPKVMERLIEFAYTASISMGEKCVLHVMNGAVMYQIDSVVRACSDFLVQQLDPSNAIGIANFAEQIGCVELHQRAREYIYMHFGEVAKQEEFFNLSHCQLVTLISRDDLNVRCESEVFHACINWVKYDCEQRRFYVQALLRAVRCHSLTPNFLQMQLQKCEILQSDSRCKDYLVKIFEELTLHKPTQVMPCRAPGSGSGSGSGSGSDIVLTQSPASLAVSLGQRATISCRASESVDNYGFSFMNWFQQKPGQPPKLLIYATSNRGSGVPARFSGSGSGTDFSLNIHPVEEDDSAMYFCQQTKEVPWTFGGGTKLEIKRGGGGSGGGDSGGGGSEVKLVESGGDLVKPGGSLKLSCAASGFTFSHYGMSWVRQTPDKRLEWVATIGSRGTYTHYPDSVKGRFTISRDNDKNALYLQMNSLRTEDTAMYYCARKSEFYYYGNTYYYSAMDYWGQGASVTVSS

SEQ ID NO: 210 - protein, 602 aa, synthetic construct
  source 1..602: note = HA-NLS-Keap1-(GS)1-3DX.2 peptide
MYPYDVPDYAPAAKRVKLDGSGSGSQPDPRPSGAGACCRFLPLQSQCPEGAGDAVMYASTECKAEVTPSQHGNRTFSYTLEDHTKQAFGIMNELRLSQQLCDVTLQVKYQDAPAAQFMAHKVVLASSSPVFKAMFTNGLREQGMEVVSIEGIHPKVMERLIEFAYTASISMGEKCVLHVMNGAVMYQIDSVVRACSDFLVQQLDPSNAIGIANFAEQIGCVELHQRAREYIYMHFGEVAKQEEFFNLSHCQLVTLISRDDLNVRCESEVFHACINWVKYDCEQRRFYVQALLRAVRCHSLTPNFLQMQLQKCEILQSDSRCKDYLVKIFEELTLHKPTQVMPCRAPGSDIVLTQSPASLAVSLGQRATISCRASESVDNYGFSFMNWFQQKPGQPPKLLIYATSNRGSGVPARFSGSGSGTDFSLNIHPVEEDDSAMYFCQQTKEVPWTFGGGTKLEIKRGGGGSGGGDSGGGGSEVKLVESGGDLVKPGGSLKLSCAASGFTFSHYGMSWVRQTPDKRLEWVATIGSRGTYTHYPDSVKGRFTISRDNDKNALYLQMNSLRTEDTAMYYCARKSEFYYYGNTYYYSAMDYWGQGASVTVSS

SEQ ID NO: 211 - protein, 604 aa, synthetic construct
  source 1..604: note = HA-NLS-Keap1-(GS)2-3DX.2 peptide
MYPYDVPDYAPAAKRVKLDGSGSGSQPDPRPSGAGACCRFLPLQSQCPEGAGDAVMYASTECKAEVTPSQHGNRTFSYTLEDHTKQAFGIMNELRLSQQLCDVTLQVKYQDAPAAQFMAHKVVLASSSPVFKAMFTNGLREQGMEVVSIEGIHPKVMERLIEFAYTASISMGEKCVLHVMNGAVMYQIDSVVRACSDFLVQQLDPSNAIGIANFAEQIGCVELHQRAREYIYMHFGEVAKQEEFFNLSHCQLVTLISRDDLNVRCESEVFHACINWVKYDCEQRRFYVQALLRAVRCHSLTPNFLQMQLQKCEILQSDSRCKDYLVKIFEELTLHKPTQVMPCRAPGSGSDIVLTQSPASLAVSLGQRATISCRASESVDNYGFSFMNWFQQKPGQPPKLLIYATSNRGSGVPARFSGSGSGTDFSLNIHPVEEDDSAMYFCQQTKEVPWTFGGGTKLEIKRGGGGSGGGDSGGGGSEVKLVESGGDLVKPGGSLKLSCAASGFTFSHYGMSWVRQTPDKRLEWVATIGSRGTYTHYPDSVKGRFTISRDNDKNALYLQMNSLRTEDTAMYYCARKSEFYYYGNTYYYSAMDYWGQGASVTVSS

SEQ ID NO: 212 - protein, 606 aa, synthetic construct
  source 1..606: note = HA-NLS-Keap1-(GS)3-3DX.2 peptide
MYPYDVPDYAPAAKRVKLDGSGSGSQPDPRPSGAGACCRFLPLQSQCPEGAGDAVMYASTECKAEVTPSQHGNRTFSYTLEDHTKQAFGIMNELRLSQQLCDVTLQVKYQDAPAAQFMAHKVVLASSSPVFKAMFTNGLREQGMEVVSIEGIHPKVMERLIEFAYTASISMGEKCVLHVMNGAVMYQIDSVVRACSDFLVQQLDPSNAIGIANFAEQIGCVELHQRAREYIYMHFGEVAKQEEFFNLSHCQLVTLISRDDLNVRCESEVFHACINWVKYDCEQRRFYVQALLRAVRCHSLTPNFLQMQLQKCEILQSDSRCKDYLVKIFEELTLHKPTQVMPCRAPGSGSGSDIVLTQSPASLAVSLGQRATISCRASESVDNYGFSFMNWFQQKPGQPPKLLIYATSNRGSGVPARFSGSGSGTDFSLNIHPVEEDDSAMYFCQQTKEVPWTFGGGTKLEIKRGGGGSGGGDSGGGGSEVKLVESGGDLVKPGGSLKLSCAASGFTFSHYGMSWVRQTPDKRLEWVATIGSRGTYTHYPDSVKGRFTISRDNDKNALYLQMNSLRTEDTAMYYCARKSEFYYYGNTYYYSAMDYWGQGASVTVSS

SEQ ID NO: 213 - protein, 608 aa, synthetic construct
  source 1..608: note = HA-NLS-Keap1-(GS)4-3DX.2 peptide
MYPYDVPDYAPAAKRVKLDGSGSGSQPDPRPSGAGACCRFLPLQSQCPEGAGDAVMYASTECKAEVTPSQHGNRTFSYTLEDHTKQAFGIMNELRLSQQLCDVTLQVKYQDAPAAQFMAHKVVLASSSPVFKAMFTNGLREQGMEVVSIEGIHPKVMERLIEFAYTASISMGEKCVLHVMNGAVMYQIDSVVRACSDFLVQQLDPSNAIGIANFAEQIGCVELHQRAREYIYMHFGEVAKQEEFFNLSHCQLVTLISRDDLNVRCESEVFHACINWVKYDCEQRRFYVQALLRAVRCHSLTPNFLQMQLQKCEILQSDSRCKDYLVKIFEELTLHKPTQVMPCRAPGSGSGSGSDIVLTQSPASLAVSLGQRATISCRASESVDNYGFSFMNWFQQKPGQPPKLLIYATSNRGSGVPARFSGSGSGTDFSLNIHPVEEDDSAMYFCQQTKEVPWTFGGGTKLEIKRGGGGSGGGDSGGGGSEVKLVESGGDLVKPGGSLKLSCAASGFTFSHYGMSWVRQTPDKRLEWVATIGSRGTYTHYPDSVKGRFTISRDNDKNALYLQMNSLRTEDTAMYYCARKSEFYYYGNTYYYSAMDYWGQGASVTVSS

SEQ ID NO: 214 - protein, 610 aa, synthetic construct
  source 1..610: note = HA-NLS-Keap1-(GS)5-3DX.2 peptide
MYPYDVPDYAPAAKRVKLDGSGSGSQPDPRPSGAGACCRFLPLQSQCPEGAGDAVMYASTECKAEVTPSQHGNRTFSYTLEDHTKQAFGIMNELRLSQQLCDVTLQVKYQDAPAAQFMAHKVVLASSSPVFKAMFTNGLREQGMEVVSIEGIHPKVMERLIEFAYTASISMGEKCVLHVMNGAVMYQIDSVVRACSDFLVQQLDPSNAIGIANFAEQIGCVELHQRAREYIYMHFGEVAKQEEFFNLSHCQLVTLISRDDLNVRCESEVFHACINWVKYDCEQRRFYVQALLRAVRCHSLTPNFLQMQLQKCEILQSDSRCKDYLVKIFEELTLHKPTQVMPCRAPGSGSGSGSGSDIVLTQSPASLAVSLGQRATISCRASESVDNYGFSFMNWFQQKPGQPPKLLIYATSNRGSGVPARFSGSGSGTDFSLNIHPVEEDDSAMYFCQQTKEVPWTFGGGTKLEIKRGGGGSGGGDSGGGGSEVKLVESGGDLVKPGGSLKLSCAASGFTFSHYGMSWVRQTPDKRLEWVATIGSRGTYTHYPDSVKGRFTISRDNDKNALYLQMNSLRTEDTAMYYCARKSEFYYYGNTYYYSAMDYWGQGASVTVSS

SEQ ID NO: 215 - protein, 612 aa, synthetic construct
  source 1..612: note = HA-NLS-Keap1-(GS)6-3DX.2 peptide
MYPYDVPDYAPAAKRVKLDGSGSGSQPDPRPSGAGACCRFLPLQSQCPEGAGDAVMYASTECKAEVTPSQHGNRTFSYTLEDHTKQAFGIMNELRLSQQLCDVTLQVKYQDAPAAQFMAHKVVLASSSPVFKAMFTNGLREQGMEVVSIEGIHPKVMERLIEFAYTASISMGEKCVLHVMNGAVMYQIDSVVRACSDFLVQQLDPSNAIGIANFAEQIGCVELHQRAREYIYMHFGEVAKQEEFFNLSHCQLVTLISRDDLNVRCESEVFHACINWVKYDCEQRRFYVQALLRAVRCHSLTPNFLQMQLQKCEILQSDSRCKDYLVKIFEELTLHKPTQVMPCRAPGSGSGSGSGSGSDIVLTQSPASLAVSLGQRATISCRASESVDNYGFSFMNWFQQKPGQPPKLLIYATSNRGSGVPARFSGSGSGTDFSLNIHPVEEDDSAMYFCQQTKEVPWTFGGGTKLEIKRGGGGSGGGDSGGGGSEVKLVESGGDLVKPGGSLKLSCAASGFTFSHYGMSWVRQTPDKRLEWVATIGSRGTYTHYPDSVKGRFTISRDNDKNALYLQMNSLRTEDTAMYYCARKSEFYYYGNTYYYSAMDYWGQGASVTVSS

SEQ ID NO: 216 - protein, 398 aa, synthetic construct
  source 1..398: note = NLS-RNF125-(GS)1-3DX.2 peptide
PAAKRVKLDGSGSGSGSVLSTDSGKSAPASATARALERRRDPELPVTSFDCAVCLEVLHQPVRTRCGHVFCRSCIATSLKNNKWTCPYCRAYLPSEGVPATDVAKRMKSEYKNCAECDTLVCLSEMRAHIRTCQKYIDKYGPGSDIVLTQSPASLAVSLGQRATISCRASESVDNYGFSFMNWFQQKPGQPPKLLIYATSNRGSGVPARFSGSGSGTDFSLNIHPVEEDDSAMYFCQQTKEVPWTFGGGTKLEIKRGGGGSGGGDSGGGGSEVKLVESGGDLVKPGGSLKLSCAASGFTFSHYGMSWVRQTPDKRLEWVATIGSRGTYTHYPDSVKGRFTISRDNDKNALYLQMNSLRTEDTAMYYCARKSEFYYYGNTYYYSAMDYWGQGASVTVSS

SEQ ID NO: 217 - protein, 400 aa, synthetic construct
  source 1..400: note = NLS-RNF125-(GS)2-3DX.2 peptide
PAAKRVKLDGSGSGSGSVLSTDSGKSAPASATARALERRRDPELPVTSFDCAVCLEVLHQPVRTRCGHVFCRSCIATSLKNNKWTCPYCRAYLPSEGVPATDVAKRMKSEYKNCAECDTLVCLSEMRAHIRTCQKYIDKYGPGSGSDIVLTQSPASLAVSLGQRATISCRASESVDNYGFSFMNWFQQKPGQPPKLLIYATSNRGSGVPARFSGSGSGTDFSLNIHPVEEDDSAMYFCQQTKEVPWTFGGGTKLEIKRGGGGSGGGDSGGGGSEVKLVESGGDLVKPGGSLKLSCAASGFTFSHYGMSWVRQTPDKRLEWVATIGSRGTYTHYPDSVKGRFTISRDNDKNALYLQMNSLRTEDTAMYYCARKSEFYYYGNTYYYSAMDYWGQGASVTVSS

SEQ ID NO: 218 - protein, 402 aa, synthetic construct
  source 1..402: note = NLS-RNF125-(GS)3-3DX.2 peptide
PAAKRVKLDGSGSGSGSVLSTDSGKSAPASATARALERRRDPELPVTSFDCAVCLEVLHQPVRTRCGHVFCRSCIATSLKNNKWTCPYCRAYLPSEGVPATDVAKRMKSEYKNCAECDTLVCLSEMRAHIRTCQKYIDKYGPGSGSGSDIVLTQSPASLAVSLGQRATISCRASESVDNYGFSFMNWFQQKPGQPPKLLIYATSNRGSGVPARFSGSGSGTDFSLNIHPVEEDDSAMYFCQQTKEVPWTFGGGTKLEIKRGGGGSGGGDSGGGGSEVKLVESGGDLVKPGGSLKLSCAASGFTFSHYGMSWVRQTPDKRLEWVATIGSRGTYTHYPDSVKGRFTISRDNDKNALYLQMNSLRTEDTAMYYCARKSEFYYYGNTYYYSAMDYWGQGASVTVSS

SEQ ID NO: 219 - protein, 404 aa, synthetic construct
  source 1..404: note = NLS-RNF125-(GS)4-3DX.2 peptide
PAAKRVKLDGSGSGSGSVLSTDSGKSAPASATARALERRRDPELPVTSFDCAVCLEVLHQPVRTRCGHVFCRSCIATSLKNNKWTCPYCRAYLPSEGVPATDVAKRMKSEYKNCAECDTLVCLSEMRAHIRTCQKYIDKYGPGSGSGSGSDIVLTQSPASLAVSLGQRATISCRASESVDNYGFSFMNWFQQKPGQPPKLLIYATSNRGSGVPARFSGSGSGTDFSLNIHPVEEDDSAMYFCQQTKEVPWTFGGGTKLEIKRGGGGSGGGDSGGGGSEVKLVESGGDLVKPGGSLKLSCAASGFTFSHYGMSWVRQTPDKRLEWVATIGSRGTYTHYPDSVKGRFTISRDNDKNALYLQMNSLRTEDTAMYYCARKSEFYYYGNTYYYSAMDYWGQGASVTVSS

SEQ ID NO: 220 - protein, 406 aa, synthetic construct
  source 1..406: note = NLS-RNF125-(GS)5-3DX.2 peptide
PAAKRVKLDGSGSGSGSVLSTDSGKSAPASATARALERRRDPELPVTSFDCAVCLEVLHQPVRTRCGHVFCRSCIATSLKNNKWTCPYCRAYLPSEGVPATDVAKRMKSEYKNCAECDTLVCLSEMRAHIRTCQKYIDKYGPGSGSGSGSGSDIVLTQSPASLAVSLGQRATISCRASESVDNYGFSFMNWFQQKPGQPPKLLIYATSNRGSGVPARFSGSGSGTDFSLNIHPVEEDDSAMYFCQQTKEVPWTFGGGTKLEIKRGGGGSGGGDSGGGGSEVKLVESGGDLVKPGGSLKLSCAASGFTFSHYGMSWVRQTPDKRLEWVATIGSRGTYTHYPDSVKGRFTISRDNDKNALYLQMNSLRTEDTAMYYCARKSEFYYYGNTYYYSAMDYWGQGASVTVSS

SEQ ID NO: 221 - protein, 408 aa, synthetic construct
  source 1..408: note = NLS-RNF125-(GS)6-3DX.2 peptide
PAAKRVKLDGSGSGSGSVLSTDSGKSAPASATARALERRRDPELPVTSFDCAVCLEVLHQPVRTRCGHVFCRSCIATSLKNNKWTCPYCRAYLPSEGVPATDVAKRMKSEYKNCAECDTLVCLSEMRAHIRTCQKYIDKYGPGSGSGSGSGSGSDIVLTQSPASLAVSLGQRATISCRASESVDNYGFSFMNWFQQKPGQPPKLLIYATSNRGSGVPARFSGSGSGTDFSLNIHPVEEDDSAMYFCQQTKEVPWTFGGGTKLEIKRGGGGSGGGDSGGGGSEVKLVESGGDLVKPGGSLKLSCAASGFTFSHYGMSWVRQTPDKRLEWVATIGSRGTYTHYPDSVKGRFTISRDNDKNALYLQMNSLRTEDTAMYYCARKSEFYYYGNTYYYSAMDYWGQGASVTVSS

SEQ ID NO: 222 - protein, 408 aa, synthetic construct
  source 1..408: note = HA-NLS-RNF125-(GS)1-3DX.2 peptide
MYPYDVPDYAPAAKRVKLDGSGSGSGSVLSTDSGKSAPASATARALERRRDPELPVTSFDCAVCLEVLHQPVRTRCGHVFCRSCIATSLKNNKWTCPYCRAYLPSEGVPATDVAKRMKSEYKNCAECDTLVCLSEMRAHIRTCQKYIDKYGPGSDIVLTQSPASLAVSLGQRATISCRASESVDNYGFSFMNWFQQKPGQPPKLLIYATSNRGSGVPARFSGSGSGTDFSLNIHPVEEDDSAMYFCQQTKEVPWTFGGGTKLEIKRGGGGSGGGDSGGGGSEVKLVESGGDLVKPGGSLKLSCAASGFTFSHYGMSWVRQTPDKRLEWVATIGSRGTYTHYPDSVKGRFTISRDNDKNALYLQMNSLRTEDTAMYYCARKSEFYYYGNTYYYSAMDYWGQGASVTVSS

SEQ ID NO: 223 - protein, 410 aa, synthetic construct
  source 1..410: note = HA-NLS-RNF125-(GS)2-3DX.2 peptide
MYPYDVPDYAPAAKRVKLDGSGSGSGSVLSTDSGKSAPASATARALERRRDPELPVTSFDCAVCLEVLHQPVRTRCGHVFCRSCIATSLKNNKWTCPYCRAYLPSEGVPATDVAKRMKSEYKNCAECDTLVCLSEMRAHIRTCQKYIDKYGPGSGSDIVLTQSPASLAVSLGQRATISCRASESVDNYGFSFMNWFQQKPGQPPKLLIYATSNRGSGVPARFSGSGSGTDFSLNIHPVEEDDSAMYFCQQTKEVPWTFGGGTKLEIKRGGGGSGGGDSGGGGSEVKLVESGGDLVKPGGSLKLSCAASGFTFSHYGMSWVRQTPDKRLEWVATIGSRGTYTHYPDSVKGRFTISRDNDKNALYLQMNSLRTEDTAMYYCARKSEFYYYGNTYYYSAMDYWGQGASVTVSS

SEQ ID NO: 224 - protein, 412 aa, synthetic construct
  source 1..412: note = HA-NLS-RNF125-(GS)3-3DX.2 peptide
MYPYDVPDYAPAAKRVKLDGSGSGSGSVLSTDSGKSAPASATARALERRRDPELPVTSFDCAVCLEVLHQPVRTRCGHVFCRSCIATSLKNNKWTCPYCRAYLPSEGVPATDVAKRMKSEYKNCAECDTLVCLSEMRAHIRTCQKYIDKYGPGSGSGSDIVLTQSPASLAVSLGQRATISCRASESVDNYGFSFMNWFQQKPGQPPKLLIYATSNRGSGVPARFSGSGSGTDFSLNIHPVEEDDSAMYFCQQTKEVPWTFGGGTKLEIKRGGGGSGGGDSGGGGSEVKLVESGGDLVKPGGSLKLSCAASGFTFSHYGMSWVRQTPDKRLEWVATIGSRGTYTHYPDSVKGRFTISRDNDKNALYLQMNSLRTEDTAMYYCARKSEFYYYGNTYYYSAMDYWGQGASVTVSS

SEQ ID NO: 225 - protein, 414 aa, synthetic construct
  source 1..414: note = HA-NLS-RNF125-(GS)4-3DX.2 peptide
MYPYDVPDYAPAAKRVKLDGSGSGSGSVLSTDSGKSAPASATARALERRRDPELPVTSFDCAVCLEVLHQPVRTRCGHVFCRSCIATSLKNNKWTCPYCRAYLPSEGVPATDVAKRMKSEYKNCAECDTLVCLSEMRAHIRTCQKYIDKYGPGSGSGSGSDIVLTQSPASLAVSLGQRATISCRASESVDNYGFSFMNWFQQKPGQPPKLLIYATSNRGSGVPARFSGSGSGTDFSLNIHPVEEDDSAMYFCQQTKEVPWTFGGGTKLEIKRGGGGSGGGDSGGGGSEVKLVESGGDLVKPGGSLKLSCAASGFTFSHYGMSWVRQTPDKRLEWVATIGSRGTYTHYPDSVKGRFTISRDNDKNALYLQMNSLRTEDTAMYYCARKSEFYYYGNTYYYSAMDYWGQGASVTVSS

SEQ ID NO: 226 - protein, 416 aa, synthetic construct
  source 1..416: note = HA-NLS-RNF125-(GS)5-3DX.2 peptide
MYPYDVPDYAPAAKRVKLDGSGSGSGSVLSTDSGKSAPASATARALERRRDPELPVTSFDCAVCLEVLHQPVRTRCGHVFCRSCIATSLKNNKWTCPYCRAYLPSEGVPATDVAKRMKSEYKNCAECDTLVCLSEMRAHIRTCQKYIDKYGPGSGSGSGSGSDIVLTQSPASLAVSLGQRATISCRASESVDNYGFSFMNWFQQKPGQPPKLLIYATSNRGSGVPARFSGSGSGTDFSLNIHPVEEDDSAMYFCQQTKEVPWTFGGGTKLEIKRGGGGSGGGDSGGGGSEVKLVESGGDLVKPGGSLKLSCAASGFTFSHYGMSWVRQTPDKRLEWVATIGSRGTYTHYPDSVKGRFTISRDNDKNALYLQMNSLRTEDTAMYYCARKSEFYYYGNTYYYSAMDYWGQGASVTVSS

SEQ ID NO: 227 - protein, 418 aa, synthetic construct
  source 1..418: note = HA-NLS-RNF125-(GS)6-3DX.2 peptide
MYPYDVPDYAPAAKRVKLDGSGSGSGSVLSTDSGKSAPASATARALERRRDPELPVTSFDCAVCLEVLHQPVRTRCGHVFCRSCIATSLKNNKWTCPYCRAYLPSEGVPATDVAKRMKSEYKNCAECDTLVCLSEMRAHIRTCQKYIDKYGPGSGSGSGSGSGSDIVLTQSPASLAVSLGQRATISCRASESVDNYGFSFMNWFQQKPGQPPKLLIYATSNRGSGVPARFSGSGSGTDFSLNIHPVEEDDSAMYFCQQTKEVPWTFGGGTKLEIKRGGGGSGGGDSGGGGSEVKLVESGGDLVKPGGSLKLSCAASGFTFSHYGMSWVRQTPDKRLEWVATIGSRGTYTHYPDSVKGRFTISRDNDKNALYLQMNSLRTEDTAMYYCARKSEFYYYGNTYYYSAMDYWGQGASVTVSS

SEQ ID NO: 228 - protein, 498 aa, synthetic construct
  source 1..498: note = 3DX.2-(GS)1-SPOP-NLS peptide
MDIVLTQSPASLAVSLGQRATISCRASESVDNYGFSFMNWFQQKPGQPPKLLIYATSNRGSGVPARFSGSGSGTDFSLNIHPVEEDDSAMYFCQQTKEVPWTFGGGTKLEIKRGGGGSGGGDSGGGGSEVKLVESGGDLVKPGGSLKLSCAASGFTFSHYGMSWVRQTPDKRLEWVATIGSRGTYTHYPDSVKGRFTISRDNDKNALYLQMNSLRTEDTAMYYCARKSEFYYYGNTYYYSAMDYWGQGASVTVSSGSNGLLPDDKLTLFCEVSVVQDSVNISGQNTMNMVKVPECRLADELGGLWENSRFTDCCLCVAGQEFQAHKAILAARSPVFSAMFEHEMEESKKNRVEINDVEPEVFKEMMCFIYTGKAPNLDKMADDLLAAADKYALERLKVMCEDALCSNLSVENAAEILILADLHSADQLKTQAVDFINYHASDVLETSGWKSMVVSHPHLVAEAYRSLASAQCPFLGPPRKRLKQSGSGSPAAKRVKLD

SEQ ID NO: 229 - protein, 500 aa, synthetic construct
  source 1..500: note = 3DX.2-(GS)2-SPOP-NLS peptide
MDIVLTQSPASLAVSLGQRATISCRASESVDNYGFSFMNWFQQKPGQPPKLLIYATSNRGSGVPARFSGSGSGTDFSLNIHPVEEDDSAMYFCQQTKEVPWTFGGGTKLEIKRGGGGSGGGDSGGGGSEVKLVESGGDLVKPGGSLKLSCAASGFTFSHYGMSWVRQTPDKRLEWVATIGSRGTYTHYPDSVKGRFTISRDNDKNALYLQMNSLRTEDTAMYYCARKSEFYYYGNTYYYSAMDYWGQGASVTVSSGSGSNGLLPDDKLTLFCEVSVVQDSVNISGQNTMNMVKVPECRLADELGGLWENSRFTDCCLCVAGQEFQAHKAILAARSPVFSAMFEHEMEESKKNRVEINDVEPEVFKEMMCFIYTGKAPNLDKMADDLLAAADKYALERLKVMCEDALCSNLSVENAAEILILADLHSADQLKTQAVDFINYHASDVLETSGWKSMVVSHPHLVAEAYRSLASAQCPFLGPPRKRLKQSGSGSPAAKRVKLD

SEQ ID NO: 230 - protein, 502 aa, synthetic construct
  source 1..502: note = 3DX.2-(GS)3-SPOP-NLS peptide
MDIVLTQSPASLAVSLGQRATISCRASESVDNYGFSFMNWFQQKPGQPPKLLIYATSNRGSGVPARFSGSGSGTDFSLNIHPVEEDDSAMYFCQQTKEVPWTFGGGTKLEIKRGGGGSGGGDSGGGGSEVKLVESGGDLVKPGGSLKLSCAASGFTFSHYGMSWVRQTPDKRLEWVATIGSRGTYTHYPDSVKGRFTISRDNDKNALYLQMNSLRTEDTAMYYCARKSEFYYYGNTYYYSAMDYWGQGASVTVSSGSGSGSNGLLPDDKLTLFCEVSVVQDSVNISGQNTMNMVKVPECRLADELGGLWENSRFTDCCLCVAGQEFQAHKAILAARSPVFSAMFEHEMEESKKNRVEINDVEPEVFKEMMCFIYTGKAPNLDKMADDLLAAADKYALERLKVMCEDALCSNLSVENAAEILILADLHSADQLKTQAVDFINYHASDVLETSGWKSMVVSHPHLVAEAYRSLASAQCPFLGPPRKRLKQSGSGSPAAKRVKLD

SEQ ID NO: 231 - protein, 504 aa, synthetic construct
  source 1..504: note = 3DX.2-(GS)4-SPOP-NLS peptide
MDIVLTQSPASLAVSLGQRATISCRASESVDNYGFSFMNWFQQKPGQPPKLLIYATSNRGSGVPARFSGSGSGTDFSLNIHPVEEDDSAMYFCQQTKEVPWTFGGGTKLEIKRGGGGSGGGDSGGGGSEVKLVESGGDLVKPGGSLKLSCAASGFTFSHYGMSWVRQTPDKRLEWVATIGSRGTYTHYPDSVKGRFTISRDNDKNALYLQMNSLRTEDTAMYYCARKSEFYYYGNTYYYSAMDYWGQGASVTVSSGSGSGSGSNGLLPDDKLTLFCEVSVVQDSVNISGQNTMNMVKVPECRLADELGGLWENSRFTDCCLCVAGQEFQAHKAILAARSPVFSAMFEHEMEESKKNRVEINDVEPEVFKEMMCFIYTGKAPNLDKMADDLLAAADKYALERLKVMCEDALCSNLSVENAAEILILADLHSADQLKTQAVDFINYHASDVLETSGWKSMVVSHPHLVAEAYRSLASAQCPFLGPPRKRLKQSGSGSPAAKRVKLD

SEQ ID NO: 232 - protein, 507 aa, synthetic construct
  source 1..507: note = 3DX.2-(GS)5-SPOP-NLS peptide
MDIVLTQSPASLAVSLGQRATISCRASESVDNYGFSFMNWFQQKPGQPPKLLIYATSNRGSGVPARFSGSGSGTDFSLNIHPVEEDDSAMYFCQQTKEVPWTFGGGTKLEIKRGGGGSGGGDSGGGGSEVKLVESGGDLVKPGGSLKLSCAASGFTFSHYGMSWVRQTPDKRLEWVATIGSRGTYTHYPDSVKGRFTISRDNDKNALYLQMNSLRTEDTAMYYCARKSEFYYYGNTYYYSAMDYWGQGASVTVSSGSGSGSGSGSNGLLPDDKLTLFCEVSVVQDSVNISGQNTMNMVKVPECRLADELGGLWENSRFTDCCLCVAGQEFQAHKAILAARSPVFSAMFEHEMEESKKNRVEINDVEPEVFKEMMCFIYTGKAPNLDKMADDLLAAADKYALERLKVMCEDALCSNLSVENAAEILILADLHSADQLKTQAVDFINYHASDVLETSGWKSMVVSHPHLVAEAYRSLASAQCPFLGPPRKRLKQSGSGSPAAKRVKLDA

SEQ ID NO: 233 - protein, 508 aa, synthetic construct
  source 1..508: note = 3DX.2-(GS)6-SPOP-NLS peptide
MDIVLTQSPASLAVSLGQRATISCRASESVDNYGFSFMNWFQQKPGQPPKLLIYATSNRGSGVPARFSGSGSGTDFSLNIHPVEEDDSAMYFCQQTKEVPWTFGGGTKLEIKRGGGGSGGGDSGGGGSEVKLVESGGDLVKPGGSLKLSCAASGFTFSHYGMSWVRQTPDKRLEWVATIGSRGTYTHYPDSVKGRFTISRDNDKNALYLQMNSLRTEDTAMYYCARKSEFYYYGNTYYYSAMDYWGQGASVTVSSGSGSGSGSGSGSNGLLPDDKLTLFCEVSVVQDSVNISGQNTMNMVKVPECRLADELGGLWENSRFTDCCLCVAGQEFQAHKAILAARSPVFSAMFEHEMEESKKNRVEINDVEPEVFKEMMCFIYTGKAPNLDKMADDLLAAADKYALERLKVMCEDALCSNLSVENAAEILILADLHSADQLKTQAVDFINYHASDVLETSGWKSMVVSHPHLVAEAYRSLASAQCPFLGPPRKRLKQSGSGSPAAKRVKLD

SEQ ID NO: 234 - protein, 507 aa, synthetic construct
  source 1..507: note = 3DX.2-(GS)1-SPOP-NLS-HA peptide
MDIVLTQSPASLAVSLGQRATISCRASESVDNYGFSFMNWFQQKPGQPPKLLIYATSNRGSGVPARFSGSGSGTDFSLNIHPVEEDDSAMYFCQQTKEVPWTFGGGTKLEIKRGGGGSGGGDSGGGGSEVKLVESGGDLVKPGGSLKLSCAASGFTFSHYGMSWVRQTPDKRLEWVATIGSRGTYTHYPDSVKGRFTISRDNDKNALYLQMNSLRTEDTAMYYCARKSEFYYYGNTYYYSAMDYWGQGASVTVSSGSNGLLPDDKLTLFCEVSVVQDSVNISGQNTMNMVKVPECRLADELGGLWENSRFTDCCLCVAGQEFQAHKAILAARSPVFSAMFEHEMEESKKNRVEINDVEPEVFKEMMCFIYTGKAPNLDKMADDLLAAADKYALERLKVMCEDALCSNLSVENAAEILILADLHSADQLKTQAVDFINYHASDVLETSGWKSMVVSHPHLVAEAYRSLASAQCPFLGPPRKRLKQSGSGSPAAKRVKLDYPYDVPDYA

SEQ ID NO: 235 - protein, 509 aa, synthetic construct
  source 1..509: note = 3DX.2-(GS)2-SPOP-NLS-HA peptide
MDIVLTQSPASLAVSLGQRATISCRASESVDNYGFSFMNWFQQKPGQPPKLLIYATSNRGSGVPARFSGSGSGTDFSLNIHPVEEDDSAMYFCQQTKEVPWTFGGGTKLEIKRGGGGSGGGDSGGGGSEVKLVESGGDLVKPGGSLKLSCAASGFTFSHYGMSWVRQTPDKRLEWVATIGSRGTYTHYPDSVKGRFTISRDNDKNALYLQMNSLRTEDTAMYYCARKSEFYYYGNTYYYSAMDYWGQGASVTVSSGSGSNGLLPDDKLTLFCEVSVVQDSVNISGQNTMNMVKVPECRLADELGGLWENSRFTDCCLCVAGQEFQAHKAILAARSPVFSAMFEHEMEESKKNRVEINDVEPEVFKEMMCFIYTGKAPNLDKMADDLLAAADKYALERLKVMCEDALCSNLSVENAAEILILADLHSADQLKTQAVDFINYHASDVLETSGWKSMVVSHPHLVAEAYRSLASAQCPFLGPPRKRLKQSGSGSPAAKRVKLDYPYDVPDYA

SEQ ID NO: 236 - protein, 511 aa, synthetic construct
  source 1..511: note = 3DX.2-(GS)3-SPOP-NLS-HA peptide
MDIVLTQSPASLAVSLGQRATISCRASESVDNYGFSFMNWFQQKPGQPPKLLIYATSNRGSGVPARFSGSGSGTDFSLNIHPVEEDDSAMYFCQQTKEVPWTFGGGTKLEIKRGGGGSGGGDSGGGGSEVKLVESGGDLVKPGGSLKLSCAASGFTFSHYGMSWVRQTPDKRLEWVATIGSRGTYTHYPDSVKGRFTISRDNDKNALYLQMNSLRTEDTAMYYCARKSEFYYYGNTYYYSAMDYWGQGASVTVSSGSGSGSNGLLPDDKLTLFCEVSVVQDSVNISGQNTMNMVKVPECRLADELGGLWENSRFTDCCLCVAGQEFQAHKAILAARSPVFSAMFEHEMEESKKNRVEINDVEPEVFKEMMCFIYTGKAPNLDKMADDLLAAADKYALERLKVMCEDALCSNLSVENAAEILILADLHSADQLKTQAVDFINYHASDVLETSGWKSMVVSHPHLVAEAYRSLASAQCPFLGPPRKRLKQSGSGSPAAKRVKLDYPYDVPDYA

SEQ ID NO: 237 - protein, 513 aa, synthetic construct
  source 1..513: note = 3DX.2-(GS)4-SPOP-NLS-HA peptide
MDIVLTQSPASLAVSLGQRATISCRASESVDNYGFSFMNWFQQKPGQPPKLLIYATSNRGSGVPARFSGSGSGTDFSLNIHPVEEDDSAMYFCQQTKEVPWTFGGGTKLEIKRGGGGSGGGDSGGGGSEVKLVESGGDLVKPGGSLKLSCAASGFTFSHYGMSWVRQTPDKRLEWVATIGSRGTYTHYPDSVKGRFTISRDNDKNALYLQMNSLRTEDTAMYYCARKSEFYYYGNTYYYSAMDYWGQGASVTVSSGSGSGSGSNGLLPDDKLTLFCEVSVVQDSVNISGQNTMNMVKVPECRLADELGGLWENSRFTDCCLCVAGQEFQAHKAILAARSPVFSAMFEHEMEESKKNRVEINDVEPEVFKEMMCFIYTGKAPNLDKMADDLLAAADKYALERLKVMCEDALCSNLSVENAAEILILADLHSADQLKTQAVDFINYHASDVLETSGWKSMVVSHPHLVAEAYRSLASAQCPFLGPPRKRLKQSGSGSPAAKRVKLDYPYDVPDYA

SEQ ID NO: 238 - protein, 516 aa, synthetic construct
  source 1..516: note = 3DX.2-(GS)5-SPOP-NLS-HA peptide
MDIVLTQSPASLAVSLGQRATISCRASESVDNYGFSFMNWFQQKPGQPPKLLIYATSNRGSGVPARFSGSGSGTDFSLNIHPVEEDDSAMYFCQQTKEVPWTFGGGTKLEIKRGGGGSGGGDSGGGGSEVKLVESGGDLVKPGGSLKLSCAASGFTFSHYGMSWVRQTPDKRLEWVATIGSRGTYTHYPDSVKGRFTISRDNDKNALYLQMNSLRTEDTAMYYCARKSEFYYYGNTYYYSAMDYWGQGASVTVSSGSGSGSGSGSNGLLPDDKLTLFCEVSVVQDSVNISGQNTMNMVKVPECRLADELGGLWENSRFTDCCLCVAGQEFQAHKAILAARSPVFSAMFEHEMEESKKNRVEINDVEPEVFKEMMCFIYTGKAPNLDKMADDLLAAADKYALERLKVMCEDALCSNLSVENAAEILILADLHSADQLKTQAVDFINYHASDVLETSGWKSMVVSHPHLVAEAYRSLASAQCPFLGPPRKRLKQSGSGSPAAKRVKLDYPYDVPDYAA

SEQ ID NO: 239 - protein, 517 aa, synthetic construct
  source 1..517: note = 3DX.2-(GS)6-SPOP-NLS-HA peptide
MDIVLTQSPASLAVSLGQRATISCRASESVDNYGFSFMNWFQQKPGQPPKLLIYATSNRGSGVPARFSGSGSGTDFSLNIHPVEEDDSAMYFCQQTKEVPWTFGGGTKLEIKRGGGGSGGGDSGGGGSEVKLVESGGDLVKPGGSLKLSCAASGFTFSHYGMSWVRQTPDKRLEWVATIGSRGTYTHYPDSVKGRFTISRDNDKNALYLQMNSLRTEDTAMYYCARKSEFYYYGNTYYYSAMDYWGQGASVTVSSGSGSGSGSGSGSNGLLPDDKLTLFCEVSVVQDSVNISGQNTMNMVKVPECRLADELGGLWENSRFTDCCLCVAGQEFQAHKAILAARSPVFSAMFEHEMEESKKNRVEINDVEPEVFKEMMCFIYTGKAPNLDKMADDLLAAADKYALERLKVMCEDALCSNLSVENAAEILILADLHSADQLKTQAVDFINYHASDVLETSGWKSMVVSHPHLVAEAYRSLASAQCPFLGPPRKRLKQSGSGSPAAKRVKLDYPYDVPDYA

SEQ ID NO: 240 - protein, 284 aa, synthetic construct
  source 1..284: note = OMOMYC-(GS)1-CHIP-NLS peptide
MSDTEENVKRRTHNVLERQRRNELKRSFFALRDQIPELENNEKAPKVVILKKATAYILSVQAETQKLISEIDLLRKQNEQLKHKLEQLRNSCAGSRLNFGDDIPSALRIAKKKRWNSIEERRIHQESELHSYLSRLIAAERERELEECQRNHEGDEDDSHVRAQQACIEAKHDKYMADMDELFSQVDEKRKKRDIPDYLCGKISFELMREPCITPSGITYDRKDIEEHLQRVGHFDPVTRSPLTQEQLIPNLAMKEVIDAFISENGWVEDYGSGSPAAKRVKLD

SEQ ID NO: 241 - protein, 286 aa, synthetic construct
  source 1..286: note = OMOMYC-(GS)2-CHIP-NLS peptide
MSDTEENVKRRTHNVLERQRRNELKRSFFALRDQIPELENNEKAPKVVILKKATAYILSVQAETQKLISEIDLLRKQNEQLKHKLEQLRNSCAGSGSRLNFGDDIPSALRIAKKKRWNSIEERRIHQESELHSYLSRLIAAERERELEECQRNHEGDEDDSHVRAQQACIEAKHDKYMADMDELFSQVDEKRKKRDIPDYLCGKISFELMREPCITPSGITYDRKDIEEHLQRVGHFDPVTRSPLTQEQLIPNLAMKEVIDAFISENGWVEDYGSGSPAAKRVKLD

SEQ ID NO: 242 - protein, 288 aa, synthetic construct
  source 1..288: note = OMOMYC-(GS)3-CHIP-NLS peptide
MSDTEENVKRRTHNVLERQRRNELKRSFFALRDQIPELENNEKAPKVVILKKATAYILSVQAETQKLISEIDLLRKQNEQLKHKLEQLRNSCAGSGSGSRLNFGDDIPSALRIAKKKRWNSIEERRIHQESELHSYLSRLIAAERERELEECQRNHEGDEDDSHVRAQQACIEAKHDKYMADMDELFSQVDEKRKKRDIPDYLCGKISFELMREPCITPSGITYDRKDIEEHLQRVGHFDPVTRSPLTQEQLIPNLAMKEVIDAFISENGWVEDYGSGSPAAKRVKLD

SEQ ID NO: 243 - protein, 290 aa, synthetic construct
  source 1..290: note = OMOMYC-(GS)4-CHIP-NLS peptide
MSDTEENVKRRTHNVLERQRRNELKRSFFALRDQIPELENNEKAPKVVILKKATAYILSVQAETQKLISEIDLLRKQNEQLKHKLEQLRNSCAGSGSGSGSRLNFGDDIPSALRIAKKKRWNSIEERRIHQESELHSYLSRLIAAERERELEECQRNHEGDEDDSHVRAQQACIEAKHDKYMADMDELFSQVDEKRKKRDIPDYLCGKISFELMREPCITPSGITYDRKDIEEHLQRVGHFDPVTRSPLTQEQLIPNLAMKEVIDAFISENGWVEDYGSGSPAAKRVKLD

SEQ ID NO: 244 - protein, 292 aa, synthetic construct
  source 1..292: note = OMOMYC-(GS)5-CHIP-NLS peptide
MSDTEENVKRRTHNVLERQRRNELKRSFFALRDQIPELENNEKAPKVVILKKATAYILSVQAETQKLISEIDLLRKQNEQLKHKLEQLRNSCAGSGSGSGSGSRLNFGDDIPSALRIAKKKRWNSIEERRIHQESELHSYLSRLIAAERERELEECQRNHEGDEDDSHVRAQQACIEAKHDKYMADMDELFSQVDEKRKKRDIPDYLCGKISFELMREPCITPSGITYDRKDIEEHLQRVGHFDPVTRSPLTQEQLIPNLAMKEVIDAFISENGWVEDYGSGSPAAKRVKLD

SEQ ID NO: 245 - protein, 294 aa, synthetic construct
  source 1..294: note = OMOMYC-(GS)6-CHIP-NLS peptide
MSDTEENVKRRTHNVLERQRRNELKRSFFALRDQIPELENNEKAPKVVILKKATAYILSVQAETQKLISEIDLLRKQNEQLKHKLEQLRNSCAGSGSGSGSGSGSRLNFGDDIPSALRIAKKKRWNSIEERRIHQESELHSYLSRLIAAERERELEECQRNHEGDEDDSHVRAQQACIEAKHDKYMADMDELFSQVDEKRKKRDIPDYLCGKISFELMREPCITPSGITYDRKDIEEHLQRVGHFDPVTRSPLTQEQLIPNLAMKEVIDAFISENGWVEDYGSGSPAAKRVKLD

SEQ ID NO: 246 - protein, 293 aa, synthetic construct
  source 1..293: note = OMOMYC-(GS)1-CHIP-NLS-HA peptide
MSDTEENVKRRTHNVLERQRRNELKRSFFALRDQIPELENNEKAPKVVILKKATAYILSVQAETQKLISEIDLLRKQNEQLKHKLEQLRNSCAGSRLNFGDDIPSALRIAKKKRWNSIEERRIHQESELHSYLSRLIAAERERELEECQRNHEGDEDDSHVRAQQACIEAKHDKYMADMDELFSQVDEKRKKRDIPDYLCGKISFELMREPCITPSGITYDRKDIEEHLQRVGHFDPVTRSPLTQEQLIPNLAMKEVIDAFISENGWVEDYGSGSPAAKRVKLDYPYDVPDYA

SEQ ID NO: 247 - protein, 295 aa, synthetic construct
  source 1..295: note = OMOMYC-(GS)2-CHIP-NLS-HA peptide
MSDTEENVKRRTHNVLERQRRNELKRSFFALRDQIPELENNEKAPKVVILKKATAYILSVQAETQKLISEIDLLRKQNEQLKHKLEQLRNSCAGSGSRLNFGDDIPSALRIAKKKRWNSIEERRIHQESELHSYLSRLIAAERERELEECQRNHEGDEDDSHVRAQQACIEAKHDKYMADMDELFSQVDEKRKKRDIPDYLCGKISFELMREPCITPSGITYDRKDIEEHLQRVGHFDPVTRSPLTQEQLIPNLAMKEVIDAFISENGWVEDYGSGSPAAKRVKLDYPYDVPDYA

SEQ ID NO: 248 - protein, 297 aa, synthetic construct
  source 1..297: note = OMOMYC-(GS)3-CHIP-NLS-HA peptide
MSDTEENVKRRTHNVLERQRRNELKRSFFALRDQIPELENNEKAPKVVILKKATAYILSVQAETQKLISEIDLLRKQNEQLKHKLEQLRNSCAGSGSGSRLNFGDDIPSALRIAKKKRWNSIEERRIHQESELHSYLSRLIAAERERELEECQRNHEGDEDDSHVRAQQACIEAKHDKYMADMDELFSQVDEKRKKRDIPDYLCGKISFELMREPCITPSGITYDRKDIEEHLQRVGHFDPVTRSPLTQEQLIPNLAMKEVIDAFISENGWVEDYGSGSPAAKRVKLDYPYDVPDYA

SEQ ID NO: 249 - protein, 299 aa, synthetic construct
  source 1..299: note = OMOMYC-(GS)4-CHIP-NLS-HA peptide
MSDTEENVKRRTHNVLERQRRNELKRSFFALRDQIPELENNEKAPKVVILKKATAYILSVQAETQKLISEIDLLRKQNEQLKHKLEQLRNSCAGSGSGSGSRLNFGDDIPSALRIAKKKRWNSIEERRIHQESELHSYLSRLIAAERERELEECQRNHEGDEDDSHVRAQQACIEAKHDKYMADMDELFSQVDEKRKKRDIPDYLCGKISFELMREPCITPSGITYDRKDIEEHLQRVGHFDPVTRSPLTQEQLIPNLAMKEVIDAFISENGWVEDYGSGSPAAKRVKLDYPYDVPDYA

SEQ ID NO: 250 - protein, 301 aa, synthetic construct
  source 1..301: note = OMOMYC-(GS)5-CHIP-NLS-HA peptide
MSDTEENVKRRTHNVLERQRRNELKRSFFALRDQIPELENNEKAPKVVILKKATAYILSVQAETQKLISEIDLLRKQNEQLKHKLEQLRNSCAGSGSGSGSGSRLNFGDDIPSALRIAKKKRWNSIEERRIHQESELHSYLSRLIAAERERELEECQRNHEGDEDDSHVRAQQACIEAKHDKYMADMDELFSQVDEKRKKRDIPDYLCGKISFELMREPCITPSGITYDRKDIEEHLQRVGHFDPVTRSPLTQEQLIPNLAMKEVIDAFISENGWVEDYGSGSPAAKRVKLDYPYDVPDYA

SEQ ID NO: 251 - protein, 303 aa, synthetic construct
  source 1..303: note = OMOMYC-(GS)6-CHIP-NLS-HA peptide
MSDTEENVKRRTHNVLERQRRNELKRSFFALRDQIPELENNEKAPKVVILKKATAYILSVQAETQKLISEIDLLRKQNEQLKHKLEQLRNSCAGSGSGSGSGSGSRLNFGDDIPSALRIAKKKRWNSIEERRIHQESELHSYLSRLIAAERERELEECQRNHEGDEDDSHVRAQQACIEAKHDKYMADMDELFSQVDEKRKKRDIPDYLCGKISFELMREPCITPSGITYDRKDIEEHLQRVGHFDPVTRSPLTQEQLIPNLAMKEVIDAFISENGWVEDYGSGSPAAKRVKLDYPYDVPDYA

SEQ ID NO: 252 - protein, 144 aa, synthetic construct
  source 1..144: note = NLS-DCAF1-(GS)1-OMOMYC peptide
PAAKRVKLDGSGSGSQAPINFTSRLNRRASFPKYGGVDGGCFDRHLIFSRGSSDTEENVKRRTHNVLERQRRNELKRSFFALRDQIPELENNEKAPKVVILKKATAYILSVQAETQKLISEIDLLRKQNEQLKHKLEQLRNSCA

SEQ ID NO: 253 - protein, 146 aa, synthetic construct
  source 1..146: note = NLS-DCAF1-(GS)2-OMOMYC peptide
PAAKRVKLDGSGSGSQAPINFTSRLNRRASFPKYGGVDGGCFDRHLIFSRGSGSSDTEENVKRRTHNVLERQRRNELKRSFFALRDQIPELENNEKAPKVVILKKATAYILSVQAETQKLISEIDLLRKQNEQLKHKLEQLRNSCA

SEQ ID NO: 254 - protein, 148 aa, synthetic construct
  source 1..148: note = NLS-DCAF1-(GS)3-OMOMYC peptide
PAAKRVKLDGSGSGSQAPINFTSRLNRRASFPKYGGVDGGCFDRHLIFSRGSGSGSSDTEENVKRRTHNVLERQRRNELKRSFFALRDQIPELENNEKAPKVVILKKATAYILSVQAETQKLISEIDLLRKQNEQLKHKLEQLRNSCA

SEQ ID NO: 255 - protein, 150 aa, synthetic construct
  source 1..150: note = NLS-DCAF1-(GS)4-OMOMYC peptide
PAAKRVKLDGSGSGSQAPINFTSRLNRRASFPKYGGVDGGCFDRHLIFSRGSGSGSGSSDTEENVKRRTHNVLERQRRNELKRSFFALRDQIPELENNEKAPKVVILKKATAYILSVQAETQKLISEIDLLRKQNEQLKHKLEQLRNSCA

SEQ ID NO: 256 - protein, 152 aa, synthetic construct
  source 1..152: note = NLS-DCAF1-(GS)5-OMOMYC peptide
PAAKRVKLDGSGSGSQAPINFTSRLNRRASFPKYGGVDGGCFDRHLIFSRGSGSGSGSGSSDTEENVKRRTHNVLERQRRNELKRSFFALRDQIPELENNEKAPKVVILKKATAYILSVQAETQKLISEIDLLRKQNEQLKHKLEQLRNSCA

SEQ ID NO: 257 - protein, 154 aa, synthetic construct
  source 1..154: note = NLS-DCAF1-(GS)6-OMOMYC peptide
PAAKRVKLDGSGSGSQAPINFTSRLNRRASFPKYGGVDGGCFDRHLIFSRGSGSGSGSGSGSSDTEENVKRRTHNVLERQRRNELKRSFFALRDQIPELENNEKAPKVVILKKATAYILSVQAETQKLISEIDLLRKQNEQLKHKLEQLRNSCA

SEQ ID NO: 258 - protein, 154 aa, synthetic construct
  source 1..154: note = HA-NLS-DCAF1-(GS)1-OMOMYC peptide
MYPYDVPDYAPAAKRVKLDGSGSGSQAPINFTSRLNRRASFPKYGGVDGGCFDRHLIFSRGSSDTEENVKRRTHNVLERQRRNELKRSFFALRDQIPELENNEKAPKVVILKKATAYILSVQAETQKLISEIDLLRKQNEQLKHKLEQLRNSCA

SEQ ID NO: 259 - protein, 156 aa, synthetic construct
  source 1..156: note = HA-NLS-DCAF1-(GS)2-OMOMYC peptide
MYPYDVPDYAPAAKRVKLDGSGSGSQAPINFTSRLNRRASFPKYGGVDGGCFDRHLIFSRGSGSSDTEENVKRRTHNVLERQRRNELKRSFFALRDQIPELENNEKAPKVVILKKATAYILSVQAETQKLISEIDLLRKQNEQLKHKLEQLRNSCA

SEQ ID NO: 260 - protein, 158 aa, synthetic construct
  source 1..158: note = HA-NLS-DCAF1-(GS)3-OMOMYC peptide
MYPYDVPDYAPAAKRVKLDGSGSGSQAPINFTSRLNRRASFPKYGGVDGGCFDRHLIFSRGSGSGSSDTEENVKRRTHNVLERQRRNELKRSFFALRDQIPELENNEKAPKVVILKKATAYILSVQAETQKLISEIDLLRKQNEQLKHKLEQLRNSCA

SEQ ID NO: 261 - protein, 160 aa, synthetic construct
  source 1..160: note = HA-NLS-DCAF1-(GS)4-OMOMYC peptide
MYPYDVPDYAPAAKRVKLDGSGSGSQAPINFTSRLNRRASFPKYGGVDGGCFDRHLIFSRGSGSGSGSSDTEENVKRRTHNVLERQRRNELKRSFFALRDQIPELENNEKAPKVVILKKATAYILSVQAETQKLISEIDLLRKQNEQLKHKLEQLRNSCA

SEQ ID NO: 262 - protein, 162 aa, synthetic construct
  source 1..162: note = HA-NLS-DCAF1-(GS)5-OMOMYC peptide
MYPYDVPDYAPAAKRVKLDGSGSGSQAPINFTSRLNRRASFPKYGGVDGGCFDRHLIFSRGSGSGSGSGSSDTEENVKRRTHNVLERQRRNELKRSFFALRDQIPELENNEKAPKVVILKKATAYILSVQAETQKLISEIDLLRKQNEQLKHKLEQLRNSCA

SEQ ID NO: 263 - protein, 164 aa, synthetic construct
  source 1..164: note = HA-NLS-DCAF1-(GS)6-OMOMYC peptide
MYPYDVPDYAPAAKRVKLDGSGSGSQAPINFTSRLNRRASFPKYGGVDGGCFDRHLIFSRGSGSGSGSGSGSSDTEENVKRRTHNVLERQRRNELKRSFFALRDQIPELENNEKAPKVVILKKATAYILSVQAETQKLISEIDLLRKQNEQLKHKLEQLRNSCA

SEQ ID NO: 264 - protein, 465 aa, synthetic construct
  source 1..465: note = NLS-OMOMYC-(GS)1-E6AP peptide
PAAKRVKLDGSGSGSSDTEENVKRRTHNVLERQRRNELKRSFFALRDQIPELENNEKAPKVVILKKATAYILSVQAETQKLISEIDLLRKQNEQLKHKLEQLRNSCAGSNPYLRLKVRRDHIIDDALVRLEMIAMENPADLKKQLYVEFEGEQGVDEGGVSKEFFQLVVEEIFNPDIGMFTYDESTKLFWFNPSSFETEGQFTLIGIVLGLAIYNNCILDVHFPMVVYRKLMGKKGTFRDLGDSHPVLYQSLKDLLEYEGNVEDDMMITFQISQTDLFGNPMMYDLKENGDKIPITNENRKEFVNLYSDYILNKSVEKQFKAFRRGFHMVTNESPLKYLFRPEEIELLICGSRNLDFQALEETTEYDGGYTRDSVLIREFWEIVHSFTDEQKRLFLQFTTGTDRAPVGGLGKLKMIIAKNGPDTERLPTSHTCFNVLLLPEYSSKEKLKERLLKAITYAKGFGML

SEQ ID NO: 265 - protein, 467 aa, synthetic construct
  source 1..467: note = NLS-OMOMYC-(GS)2-E6AP peptide
PAAKRVKLDGSGSGSSDTEENVKRRTHNVLERQRRNELKRSFFALRDQIPELENNEKAPKVVILKKATAYILSVQAETQKLISEIDLLRKQNEQLKHKLEQLRNSCAGSGSNPYLRLKVRRDHIIDDALVRLEMIAMENPADLKKQLYVEFEGEQGVDEGGVSKEFFQLVVEEIFNPDIGMFTYDESTKLFWFNPSSFETEGQFTLIGIVLGLAIYNNCILDVHFPMVVYRKLMGKKGTFRDLGDSHPVLYQSLKDLLEYEGNVEDDMMITFQISQTDLFGNPMMYDLKENGDKIPITNENRKEFVNLYSDYILNKSVEKQFKAFRRGFHMVTNESPLKYLFRPEEIELLICGSRNLDFQALEETTEYDGGYTRDSVLIREFWEIVHSFTDEQKRLFLQFTTGTDRAPVGGLGKLKMIIAKNGPDTERLPTSHTCFNVLLLPEYSSKEKLKERLLKAITYAKGFGML

SEQ ID NO: 266 - protein, 469 aa, synthetic construct
  source 1..469: note = NLS-OMOMYC-(GS)3-E6AP peptide
PAAKRVKLDGSGSGSSDTEENVKRRTHNVLERQRRNELKRSFFALRDQIPELENNEKAPKVVILKKATAYILSVQAETQKLISEIDLLRKQNEQLKHKLEQLRNSCAGSGSGSNPYLRLKVRRDHIIDDALVRLEMIAMENPADLKKQLYVEFEGEQGVDEGGVSKEFFQLVVEEIFNPDIGMFTYDESTKLFWFNPSSFETEGQFTLIGIVLGLAIYNNCILDVHFPMVVYRKLMGKKGTFRDLGDSHPVLYQSLKDLLEYEGNVEDDMMITFQISQTDLFGNPMMYDLKENGDKIPITNENRKEFVNLYSDYILNKSVEKQFKAFRRGFHMVTNESPLKYLFRPEEIELLICGSRNLDFQALEETTEYDGGYTRDSVLIREFWEIVHSFTDEQKRLFLQFTTGTDRAPVGGLGKLKMIIAKNGPDTERLPTSHTCFNVLLLPEYSSKEKLKERLLKAITYAKGFGML

SEQ ID NO: 267 - protein, 471 aa, synthetic construct
  source 1..471: note = NLS-OMOMYC-(GS)4-E6AP peptide
PAAKRVKLDGSGSGSSDTEENVKRRTHNVLERQRRNELKRSFFALRDQIPELENNEKAPKVVILKKATAYILSVQAETQKLISEIDLLRKQNEQLKHKLEQLRNSCAGSGSGSGSNPYLRLKVRRDHIIDDALVRLEMIAMENPADLKKQLYVEFEGEQGVDEGGVSKEFFQLVVEEIFNPDIGMFTYDESTKLFWFNPSSFETEGQFTLIGIVLGLAIYNNCILDVHFPMVVYRKLMGKKGTFRDLGDSHPVLYQSLKDLLEYEGNVEDDMMITFQISQTDLFGNPMMYDLKENGDKIPITNENRKEFVNLYSDYILNKSVEKQFKAFRRGFHMVTNESPLKYLFRPEEIELLICGSRNLDFQALEETTEYDGGYTRDSVLIREFWEIVHSFTDEQKRLFLQFTTGTDRAPVGGLGKLKMIIAKNGPDTERLPTSHTCFNVLLLPEYSSKEKLKERLLKAITYAKGFGML

SEQ ID NO: 268 - protein, 473 aa, synthetic construct
  source 1..473: note = NLS-OMOMYC-(GS)5-E6AP peptide
PAAKRVKLDGSGSGSSDTEENVKRRTHNVLERQRRNELKRSFFALRDQIPELENNEKAPKVVILKKATAYILSVQAETQKLISEIDLLRKQNEQLKHKLEQLRNSCAGSGSGSGSGSNPYLRLKVRRDHIIDDALVRLEMIAMENPADLKKQLYVEFEGEQGVDEGGVSKEFFQLVVEEIFNPDIGMFTYDESTKLFWFNPSSFETEGQFTLIGIVLGLAIYNNCILDVHFPMVVYRKLMGKKGTFRDLGDSHPVLYQSLKDLLEYEGNVEDDMMITFQISQTDLFGNPMMYDLKENGDKIPITNENRKEFVNLYSDYILNKSVEKQFKAFRRGFHMVTNESPLKYLFRPEEIELLICGSRNLDFQALEETTEYDGGYTRDSVLIREFWEIVHSFTDEQKRLFLQFTTGTDRAPVGGLGKLKMIIAKNGPDTERLPTSHTCFNVLLLPEYSSKEKLKERLLKAITYAKGFGML

SEQ ID NO: 269 - protein, 475 aa, synthetic construct
  source 1..475: note = NLS-OMOMYC-(GS)6-E6AP peptide
PAAKRVKLDGSGSGSSDTEENVKRRTHNVLERQRRNELKRSFFALRDQIPELENNEKAPKVVILKKATAYILSVQAETQKLISEIDLLRKQNEQLKHKLEQLRNSCAGSGSGSGSGSGSNPYLRLKVRRDHIIDDALVRLEMIAMENPADLKKQLYVEFEGEQGVDEGGVSKEFFQLVVEEIFNPDIGMFTYDESTKLFWFNPSSFETEGQFTLIGIVLGLAIYNNCILDVHFPMVVYRKLMGKKGTFRDLGDSHPVLYQSLKDLLEYEGNVEDDMMITFQISQTDLFGNPMMYDLKENGDKIPITNENRKEFVNLYSDYILNKSVEKQFKAFRRGFHMVTNESPLKYLFRPEEIELLICGSRNLDFQALEETTEYDGGYTRDSVLIREFWEIVHSFTDEQKRLFLQFTTGTDRAPVGGLGKLKMIIAKNGPDTERLPTSHTCFNVLLLPEYSSKEKLKERLLKAITYAKGFGML

SEQ ID NO: 270 - protein, 475 aa, synthetic construct
  source 1..475: note = HA-NLS-OMOMYC-(GS)1-E6AP peptide
MYPYDVPDYAPAAKRVKLDGSGSGSSDTEENVKRRTHNVLERQRRNELKRSFFALRDQIPELENNEKAPKVVILKKATAYILSVQAETQKLISEIDLLRKQNEQLKHKLEQLRNSCAGSNPYLRLKVRRDHIIDDALVRLEMIAMENPADLKKQLYVEFEGEQGVDEGGVSKEFFQLVVEEIFNPDIGMFTYDESTKLFWFNPSSFETEGQFTLIGIVLGLAIYNNCILDVHFPMVVYRKLMGKKGTFRDLGDSHPVLYQSLKDLLEYEGNVEDDMMITFQISQTDLFGNPMMYDLKENGDKIPITNENRKEFVNLYSDYILNKSVEKQFKAFRRGFHMVTNESPLKYLFRPEEIELLICGSRNLDFQALEETTEYDGGYTRDSVLIREFWEIVHSFTDEQKRLFLQFTTGTDRAPVGGLGKLKMIIAKNGPDTERLPTSHTCFNVLLLPEYSSKEKLKERLLKAITYAKGFGML

SEQ ID NO: 271 - protein, 477 aa, synthetic construct
  source 1..477: note = HA-NLS-OMOMYC-(GS)2-E6AP peptide
MYPYDVPDYAPAAKRVKLDGSGSGSSDTEENVKRRTHNVLERQRRNELKRSFFALRDQIPELENNEKAPKVVILKKATAYILSVQAETQKLISEIDLLRKQNEQLKHKLEQLRNSCAGSGSNPYLRLKVRRDHIIDDALVRLEMIAMENPADLKKQLYVEFEGEQGVDEGGVSKEFFQLVVEEIFNPDIGMFTYDESTKLFWFNPSSFETEGQFTLIGIVLGLAIYNNCILDVHFPMVVYRKLMGKKGTFRDLGDSHPVLYQSLKDLLEYEGNVEDDMMITFQISQTDLFGNPMMYDLKENGDKIPITNENRKEFVNLYSDYILNKSVEKQFKAFRRGFHMVTNESPLKYLFRPEEIELLICGSRNLDFQALEETTEYDGGYTRDSVLIREFWEIVHSFTDEQKRLFLQFTTGTDRAPVGGLGKLKMIIAKNGPDTERLPTSHTCFNVLLLPEYSSKEKLKERLLKAITYAKGFGML

SEQ ID NO: 272 - protein, 479 aa, synthetic construct
  source 1..479: note = HA-NLS-OMOMYC-(GS)3-E6AP peptide
MYPYDVPDYAPAAKRVKLDGSGSGSSDTEENVKRRTHNVLERQRRNELKRSFFALRDQIPELENNEKAPKVVILKKATAYILSVQAETQKLISEIDLLRKQNEQLKHKLEQLRNSCAGSGSGSNPYLRLKVRRDHIIDDALVRLEMIAMENPADLKKQLYVEFEGEQGVDEGGVSKEFFQLVVEEIFNPDIGMFTYDESTKLFWFNPSSFETEGQFTLIGIVLGLAIYNNCILDVHFPMVVYRKLMGKKGTFRDLGDSHPVLYQSLKDLLEYEGNVEDDMMITFQISQTDLFGNPMMYDLKENGDKIPITNENRKEFVNLYSDYILNKSVEKQFKAFRRGFHMVTNESPLKYLFRPEEIELLICGSRNLDFQALEETTEYDGGYTRDSVLIREFWEIVHSFTDEQKRLFLQFTTGTDRAPVGGLGKLKMIIAKNGPDTERLPTSHTCFNVLLLPEYSSKEKLKERLLKAITYAKGFGML

SEQ ID NO: 273 - protein, 481 aa, synthetic construct
  source 1..481: note = HA-NLS-OMOMYC-(GS)4-E6AP peptide
MYPYDVPDYAPAAKRVKLDGSGSGSSDTEENVKRRTHNVLERQRRNELKRSFFALRDQIPELENNEKAPKVVILKKATAYILSVQAETQKLISEIDLLRKQNEQLKHKLEQLRNSCAGSGSGSGSNPYLRLKVRRDHIIDDALVRLEMIAMENPADLKKQLYVEFEGEQGVDEGGVSKEFFQLVVEEIFNPDIGMFTYDESTKLFWFNPSSFETEGQFTLIGIVLGLAIYNNCILDVHFPMVVYRKLMGKKGTFRDLGDSHPVLYQSLKDLLEYEGNVEDDMMITFQISQTDLFGNPMMYDLKENGDKIPITNENRKEFVNLYSDYILNKSVEKQFKAFRRGFHMVTNESPLKYLFRPEEIELLICGSRNLDFQALEETTEYDGGYTRDSVLIREFWEIVHSFTDEQKRLFLQFTTGTDRAPVGGLGKLKMIIAKNGPDTERLPTSHTCFNVLLLPEYSSKEKLKERLLKAITYAKGFGML

SEQ ID NO: 274 - protein, 483 aa, synthetic construct
  source 1..483: note = HA-NLS-OMOMYC-(GS)5-E6AP peptide
MYPYDVPDYAPAAKRVKLDGSGSGSSDTEENVKRRTHNVLERQRRNELKRSFFALRDQIPELENNEKAPKVVILKKATAYILSVQAETQKLISEIDLLRKQNEQLKHKLEQLRNSCAGSGSGSGSGSNPYLRLKVRRDHIIDDALVRLEMIAMENPADLKKQLYVEFEGEQGVDEGGVSKEFFQLVVEEIFNPDIGMFTYDESTKLFWFNPSSFETEGQFTLIGIVLGLAIYNNCILDVHFPMVVYRKLMGKKGTFRDLGDSHPVLYQSLKDLLEYEGNVEDDMMITFQISQTDLFGNPMMYDLKENGDKIPITNENRKEFVNLYSDYILNKSVEKQFKAFRRGFHMVTNESPLKYLFRPEEIELLICGSRNLDFQALEETTEYDGGYTRDSVLIREFWEIVHSFTDEQKRLFLQFTTGTDRAPVGGLGKLKMIIAKNGPDTERLPTSHTCFNVLLLPEYSSKEKLKERLLKAITYAKGFGML

SEQ ID NO: 275 - protein, 485 aa, synthetic construct
  source 1..485: note = HA-NLS-OMOMYC-(GS)6-E6AP peptide
MYPYDVPDYAPAAKRVKLDGSGSGSSDTEENVKRRTHNVLERQRRNELKRSFFALRDQIPELENNEKAPKVVILKKATAYILSVQAETQKLISEIDLLRKQNEQLKHKLEQLRNSCAGSGSGSGSGSGSNPYLRLKVRRDHIIDDALVRLEMIAMENPADLKKQLYVEFEGEQGVDEGGVSKEFFQLVVEEIFNPDIGMFTYDESTKLFWFNPSSFETEGQFTLIGIVLGLAIYNNCILDVHFPMVVYRKLMGKKGTFRDLGDSHPVLYQSLKDLLEYEGNVEDDMMITFQISQTDLFGNPMMYDLKENGDKIPITNENRKEFVNLYSDYILNKSVEKQFKAFRRGFHMVTNESPLKYLFRPEEIELLICGSRNLDFQALEETTEYDGGYTRDSVLIREFWEIVHSFTDEQKRLFLQFTTGTDRAPVGGLGKLKMIIAKNGPDTERLPTSHTCFNVLLLPEYSSKEKLKERLLKAITYAKGFGML

SEQ ID NO: 276 - protein, 461 aa, synthetic construct
  source 1..461: note = FBXW7a-(GS)1-OMOMYC peptide
NQELLSVGSKRRRTGGSLRGNPSSSQVDEEQMNRVVEEEQQQQLRQQEEEHTARNGEVVGVEPRPGGQNDSQQGQLEENNNRFISVDEDSSGNQEEQEEDEEHAGEQDEEDEEEEEMDQESDDFDQSDDSSREDEHTHTNSVTNSSSIVDLPVHQLSSPFYTKTTKMKRKLDHGSEVRSFSLGKKPCKVSEYTSTTGLVPCSATPTTFGDLRAANGQGQQRRRITSVQPPTGLQEWLKMFQSWSGPEKLLALDELIDSCEPTQVKHMMQVIEPQFQRDFISLLPKELALYVLSFLEPKDLLQAAQTCRYWRILAEDNLLWREKCKEEGIDEPLHIKRRKVIKPGFIHSPWKSAYIRQHRIDTNSRRGGSSDTEENVKRRTHNVLERQRRNELKRSFFALRDQIPELENNEKAPKVVILKKATAYILSVQAETQKLISEIDLLRKQNEQLKHKLEQLRNSCA

SEQ ID NO: 277 - protein, 463 aa, synthetic construct
  source 1..463: note = FBXW7a-(GS)2-OMOMYC peptide
NQELLSVGSKRRRTGGSLRGNPSSSQVDEEQMNRVVEEEQQQQLRQQEEEHTARNGEVVGVEPRPGGQNDSQQGQLEENNNRFISVDEDSSGNQEEQEEDEEHAGEQDEEDEEEEEMDQESDDFDQSDDSSREDEHTHTNSVTNSSSIVDLPVHQLSSPFYTKTTKMKRKLDHGSEVRSFSLGKKPCKVSEYTSTTGLVPCSATPTTFGDLRAANGQGQQRRRITSVQPPTGLQEWLKMFQSWSGPEKLLALDELIDSCEPTQVKHMMQVIEPQFQRDFISLLPKELALYVLSFLEPKDLLQAAQTCRYWRILAEDNLLWREKCKEEGIDEPLHIKRRKVIKPGFIHSPWKSAYIRQHRIDTNSRRGGSGSSDTEENVKRRTHNVLERQRRNELKRSFFALRDQIPELENNEKAPKVVILKKATAYILSVQAETQKLISEIDLLRKQNEQLKHKLEQLRNSCA

SEQ ID NO: 278 - protein, 465 aa, synthetic construct
  source 1..465: note = FBXW7a-(GS)3-OMOMYC peptide
NQELLSVGSKRRRTGGSLRGNPSSSQVDEEQMNRVVEEEQQQQLRQQEEEHTARNGEVVGVEPRPGGQNDSQQGQLEENNNRFISVDEDSSGNQEEQEEDEEHAGEQDEEDEEEEEMDQESDDFDQSDDSSREDEHTHTNSVTNSSSIVDLPVHQLSSPFYTKTTKMKRKLDHGSEVRSFSLGKKPCKVSEYTSTTGLVPCSATPTTFGDLRAANGQGQQRRRITSVQPPTGLQEWLKMFQSWSGPEKLLALDELIDSCEPTQVKHMMQVIEPQFQRDFISLLPKELALYVLSFLEPKDLLQAAQTCRYWRILAEDNLLWREKCKEEGIDEPLHIKRRKVIKPGFIHSPWKSAYIRQHRIDTNSRRGGSGSGSSDTEENVKRRTHNVLERQRRNELKRSFFALRDQIPELENNEKAPKVVILKKATAYILSVQAETQKLISEIDLLRKQNEQLKHKLEQLRNSCA

SEQ ID NO: 279 - protein, 467 aa, synthetic construct
  source 1..467: note = FBXW7a-(GS)4-OMOMYC peptide
NQELLSVGSKRRRTGGSLRGNPSSSQVDEEQMNRVVEEEQQQQLRQQEEEHTARNGEVVGVEPRPGGQNDSQQGQLEENNNRFISVDEDSSGNQEEQEEDEEHAGEQDEEDEEEEEMDQESDDFDQSDDSSREDEHTHTNSVTNSSSIVDLPVHQLSSPFYTKTTKMKRKLDHGSEVRSFSLGKKPCKVSEYTSTTGLVPCSATPTTFGDLRAANGQGQQRRRITSVQPPTGLQEWLKMFQSWSGPEKLLALDELIDSCEPTQVKHMMQVIEPQFQRDFISLLPKELALYVLSFLEPKDLLQAAQTCRYWRILAEDNLLWREKCKEEGIDEPLHIKRRKVIKPGFIHSPWKSAYIRQHRIDTNSRRGGSGSGSGSSDTEENVKRRTHNVLERQRRNELKRSFFALRDQIPELENNEKAPKVVILKKATAYILSVQAETQKLISEIDLLRKQNEQLKHKLEQLRNSCA

SEQ ID NO: 280 - protein, 469 aa, synthetic construct
  source 1..469: note = FBXW7a-(GS)5-OMOMYC peptide
NQELLSVGSKRRRTGGSLRGNPSSSQVDEEQMNRVVEEEQQQQLRQQEEEHTARNGEVVGVEPRPGGQNDSQQGQLEENNNRFISVDEDSSGNQEEQEEDEEHAGEQDEEDEEEEEMDQESDDFDQSDDSSREDEHTHTNSVTNSSSIVDLPVHQLSSPFYTKTTKMKRKLDHGSEVRSFSLGKKPCKVSEYTSTTGLVPCSATPTTFGDLRAANGQGQQRRRITSVQPPTGLQEWLKMFQSWSGPEKLLALDELIDSCEPTQVKHMMQVIEPQFQRDFISLLPKELALYVLSFLEPKDLLQAAQTCRYWRILAEDNLLWREKCKEEGIDEPLHIKRRKVIKPGFIHSPWKSAYIRQHRIDTNSRRGGSGSGSGSGSSDTEENVKRRTHNVLERQRRNELKRSFFALRDQIPELENNEKAPKVVILKKATAYILSVQAETQKLISEIDLLRKQNEQLKHKLEQLRNSCA

SEQ ID NO: 281 - protein, 471 aa, synthetic construct
  source 1..471: note = FBXW7a-(GS)6-OMOMYC peptide
NQELLSVGSKRRRTGGSLRGNPSSSQVDEEQMNRVVEEEQQQQLRQQEEEHTARNGEVVGVEPRPGGQNDSQQGQLEENNNRFISVDEDSSGNQEEQEEDEEHAGEQDEEDEEEEEMDQESDDFDQSDDSSREDEHTHTNSVTNSSSIVDLPVHQLSSPFYTKTTKMKRKLDHGSEVRSFSLGKKPCKVSEYTSTTGLVPCSATPTTFGDLRAANGQGQQRRRITSVQPPTGLQEWLKMFQSWSGPEKLLALDELIDSCEPTQVKHMMQVIEPQFQRDFISLLPKELALYVLSFLEPKDLLQAAQTCRYWRILAEDNLLWREKCKEEGIDEPLHIKRRKVIKPGFIHSPWKSAYIRQHRIDTNSRRGGSGSGSGSGSGSSDTEENVKRRTHNVLERQRRNELKRSFFALRDQIPELENNEKAPKVVILKKATAYILSVQAETQKLISEIDLLRKQNEQLKHKLEQLRNSCA

SEQ ID NO: 282 - protein, 471 aa, synthetic construct
  source 1..471: note = HA-FBXW7a-(GS)1-OMOMYC peptide
MYPYDVPDYANQELLSVGSKRRRTGGSLRGNPSSSQVDEEQMNRVVEEEQQQQLRQQEEEHTARNGEVVGVEPRPGGQNDSQQGQLEENNNRFISVDEDSSGNQEEQEEDEEHAGEQDEEDEEEEEMDQESDDFDQSDDSSREDEHTHTNSVTNSSSIVDLPVHQLSSPFYTKTTKMKRKLDHGSEVRSFSLGKKPCKVSEYTSTTGLVPCSATPTTFGDLRAANGQGQQRRRITSVQPPTGLQEWLKMFQSWSGPEKLLALDELIDSCEPTQVKHMMQVIEPQFQRDFISLLPKELALYVLSFLEPKDLLQAAQTCRYWRILAEDNLLWREKCKEEGIDEPLHIKRRKVIKPGFIHSPWKSAYIRQHRIDTNSRRGGSSDTEENVKRRTHNVLERQRRNELKRSFFALRDQIPELENNEKAPKVVILKKATAYILSVQAETQKLISEIDLLRKQNEQLKHKLEQLRNSCA

SEQ ID NO: 283 - protein, 473 aa, synthetic construct
  source 1..473: note = HA-FBXW7a-(GS)2-OMOMYC peptide
MYPYDVPDYANQELLSVGSKRRRTGGSLRGNPSSSQVDEEQMNRVVEEEQQQQLRQQEEEHTARNGEVVGVEPRPGGQNDSQQGQLEENNNRFISVDEDSSGNQEEQEEDEEHAGEQDEEDEEEEEMDQESDDFDQSDDSSREDEHTHTNSVTNSSSIVDLPVHQLSSPFYTKTTKMKRKLDHGSEVRSFSLGKKPCKVSEYTSTTGLVPCSATPTTFGDLRAANGQGQQRRRITSVQPPTGLQEWLKMFQSWSGPEKLLALDELIDSCEPTQVKHMMQVIEPQFQRDFISLLPKELALYVLSFLEPKDLLQAAQTCRYWRILAEDNLLWREKCKEEGIDEPLHIKRRKVIKPGFIHSPWKSAYIRQHRIDTNSRRGGSGSSDTEENVKRRTHNVLERQRRNELKRSFFALRDQIPELENNEKAPKVVILKKATAYILSVQAETQKLISEIDLLRKQNEQLKHKLEQLRNSCA

SEQ ID NO: 284 - protein, 475 aa, synthetic construct
  source 1..475: note = HA-FBXW7a-(GS)3-OMOMYC peptide
MYPYDVPDYANQELLSVGSKRRRTGGSLRGNPSSSQVDEEQMNRVVEEEQQQQLRQQEEEHTARNGEVVGVEPRPGGQNDSQQGQLEENNNRFISVDEDSSGNQEEQEEDEEHAGEQDEEDEEEEEMDQESDDFDQSDDSSREDEHTHTNSVTNSSSIVDLPVHQLSSPFYTKTTKMKRKLDHGSEVRSFSLGKKPCKVSEYTSTTGLVPCSATPTTFGDLRAANGQGQQRRRITSVQPPTGLQEWLKMFQSWSGPEKLLALDELIDSCEPTQVKHMMQVIEPQFQRDFISLLPKELALYVLSFLEPKDLLQAAQTCRYWRILAEDNLLWREKCKEEGIDEPLHIKRRKVIKPGFIHSPWKSAYIRQHRIDTNSRRGGSGSGSSDTEENVKRRTHNVLERQRRNELKRSFFALRDQIPELENNEKAPKVVILKKATAYILSVQAETQKLISEIDLLRKQNEQLKHKLEQLRNSCA

SEQ ID NO: 285 - protein, 477 aa, synthetic construct
  source 1..477: note = HA-FBXW7a-(GS)4-OMOMYC peptide
MYPYDVPDYANQELLSVGSKRRRTGGSLRGNPSSSQVDEEQMNRVVEEEQQQQLRQQEEEHTARNGEVVGVEPRPGGQNDSQQGQLEENNNRFISVDEDSSGNQEEQEEDEEHAGEQDEEDEEEEEMDQESDDFDQSDDSSREDEHTHTNSVTNSSSIVDLPVHQLSSPFYTKTTKMKRKLDHGSEVRSFSLGKKPCKVSEYTSTTGLVPCSATPTTFGDLRAANGQGQQRRRITSVQPPTGLQEWLKMFQSWSGPEKLLALDELIDSCEPTQVKHMMQVIEPQFQRDFISLLPKELALYVLSFLEPKDLLQAAQTCRYWRILAEDNLLWREKCKEEGIDEPLHIKRRKVIKPGFIHSPWKSAYIRQHRIDTNSRRGGSGSGSGSSDTEENVKRRTHNVLERQRRNELKRSFFALRDQIPELENNEKAPKVVILKKATAYILSVQAETQKLISEIDLLRKQNEQLKHKLEQLRNSCA

SEQ ID NO: 286 - protein, 479 aa, synthetic construct
  source 1..479: note = HA-FBXW7a-(GS)5-OMOMYC peptide
MYPYDVPDYANQELLSVGSKRRRTGGSLRGNPSSSQVDEEQMNRVVEEEQQQQLRQQEEEHTARNGEVVGVEPRPGGQNDSQQGQLEENNNRFISVDEDSSGNQEEQEEDEEHAGEQDEEDEEEEEMDQESDDFDQSDDSSREDEHTHTNSVTNSSSIVDLPVHQLSSPFYTKTTKMKRKLDHGSEVRSFSLGKKPCKVSEYTSTTGLVPCSATPTTFGDLRAANGQGQQRRRITSVQPPTGLQEWLKMFQSWSGPEKLLALDELIDSCEPTQVKHMMQVIEPQFQRDFISLLPKELALYVLSFLEPKDLLQAAQTCRYWRILAEDNLLWREKCKEEGIDEPLHIKRRKVIKPGFIHSPWKSAYIRQHRIDTNSRRGGSGSGSGSGSSDTEENVKRRTHNVLERQRRNELKRSFFALRDQIPELENNEKAPKVVILKKATAYILSVQAETQKLISEIDLLRKQNEQLKHKLEQLRNSCA

SEQ ID NO: 287 - protein, 481 aa, synthetic construct
  source 1..481: note = HA-FBXW7a-(GS)6-OMOMYC peptide
MYPYDVPDYANQELLSVGSKRRRTGGSLRGNPSSSQVDEEQMNRVVEEEQQQQLRQQEEEHTARNGEVVGVEPRPGGQNDSQQGQLEENNNRFISVDEDSSGNQEEQEEDEEHAGEQDEEDEEEEEMDQESDDFDQSDDSSREDEHTHTNSVTNSSSIVDLPVHQLSSPFYTKTTKMKRKLDHGSEVRSFSLGKKPCKVSEYTSTTGLVPCSATPTTFGDLRAANGQGQQRRRITSVQPPTGLQEWLKMFQSWSGPEKLLALDELIDSCEPTQVKHMMQVIEPQFQRDFISLLPKELALYVLSFLEPKDLLQAAQTCRYWRILAEDNLLWREKCKEEGIDEPLHIKRRKVIKPGFIHSPWKSAYIRQHRIDTNSRRGGSGSGSGSGSGSSDTEENVKRRTHNVLERQRRNELKRSFFALRDQIPELENNEKAPKVVILKKATAYILSVQAETQKLISEIDLLRKQNEQLKHKLEQLRNSCA

SEQ ID NO: 288 - protein, 430 aa, synthetic construct
  source 1..430: note = NLS-Keap1-(GS)1-OMOMYC peptide
PAAKRVKLDGSGSGSQPDPRPSGAGACCRFLPLQSQCPEGAGDAVMYASTECKAEVTPSQHGNRTFSYTLEDHTKQAFGIMNELRLSQQLCDVTLQVKYQDAPAAQFMAHKVVLASSSPVFKAMFTNGLREQGMEVVSIEGIHPKVMERLIEFAYTASISMGEKCVLHVMNGAVMYQIDSVVRACSDFLVQQLDPSNAIGIANFAEQIGCVELHQRAREYIYMHFGEVAKQEEFFNLSHCQLVTLISRDDLNVRCESEVFHACINWVKYDCEQRRFYVQALLRAVRCHSLTPNFLQMQLQKCEILQSDSRCKDYLVKIFEELTLHKPTQVMPCRAPGSSDTEENVKRRTHNVLERQRRNELKRSFFALRDQIPELENNEKAPKVVILKKATAYILSVQAETQKLISEIDLLRKQNEQLKHKLEQLRNSCA

SEQ ID NO: 289 - protein, 432 aa, synthetic construct
  source 1..432: note = NLS-Keap1-(GS)2-OMOMYC peptide
PAAKRVKLDGSGSGSQPDPRPSGAGACCRFLPLQSQCPEGAGDAVMYASTECKAEVTPSQHGNRTFSYTLEDHTKQAFGIMNELRLSQQLCDVTLQVKYQDAPAAQFMAHKVVLASSSPVFKAMFTNGLREQGMEVVSIEGIHPKVMERLIEFAYTASISMGEKCVLHVMNGAVMYQIDSVVRACSDFLVQQLDPSNAIGIANFAEQIGCVELHQRAREYIYMHFGEVAKQEEFFNLSHCQLVTLISRDDLNVRCESEVFHACINWVKYDCEQRRFYVQALLRAVRCHSLTPNFLQMQLQKCEILQSDSRCKDYLVKIFEELTLHKPTQVMPCRAPGSGSSDTEENVKRRTHNVLERQRRNELKRSFFALRDQIPELENNEKAPKVVILKKATAYILSVQAETQKLISEIDLLRKQNEQLKHKLEQLRNSCA

SEQ ID NO: 290 - protein, 434 aa, synthetic construct
  source 1..434: note = NLS-Keap1-(GS)3-OMOMYC peptide
PAAKRVKLDGSGSGSQPDPRPSGAGACCRFLPLQSQCPEGAGDAVMYASTECKAEVTPSQHGNRTFSYTLEDHTKQAFGIMNELRLSQQLCDVTLQVKYQDAPAAQFMAHKVVLASSSPVFKAMFTNGLREQGMEVVSIEGIHPKVMERLIEFAYTASISMGEKCVLHVMNGAVMYQIDSVVRACSDFLVQQLDPSNAIGIANFAEQIGCVELHQRAREYIYMHFGEVAKQEEFFNLSHCQLVTLISRDDLNVRCESEVFHACINWVKYDCEQRRFYVQALLRAVRCHSLTPNFLQMQLQKCEILQSDSRCKDYLVKIFEELTLHKPTQVMPCRAPGSGSGSSDTEENVKRRTHNVLERQRRNELKRSFFALRDQIPELENNEKAPKVVILKKATAYILSVQAETQKLISEIDLLRKQNEQLKHKLEQLRNSCA

SEQ ID NO: 291 - protein, 436 aa, synthetic construct
  source 1..436: note = NLS-Keap1-(GS)4-OMOMYC peptide
PAAKRVKLDGSGSGSQPDPRPSGAGACCRFLPLQSQCPEGAGDAVMYASTECKAEVTPSQHGNRTFSYTLEDHTKQAFGIMNELRLSQQLCDVTLQVKYQDAPAAQFMAHKVVLASSSPVFKAMFTNGLREQGMEVVSIEGIHPKVMERLIEFAYTASISMGEKCVLHVMNGAVMYQIDSVVRACSDFLVQQLDPSNAIGIANFAEQIGCVELHQRAREYIYMHFGEVAKQEEFFNLSHCQLVTLISRDDLNVRCESEVFHACINWVKYDCEQRRFYVQALLRAVRCHSLTPNFLQMQLQKCEILQSDSRCKDYLVKIFEELTLHKPTQVMPCRAPGSGSGSGSSDTEENVKRRTHNVLERQRRNELKRSFFALRDQIPELENNEKAPKVVILKKATAYILSVQAETQKLISEIDLLRKQNEQLKHKLEQLRNSCA

SEQ ID NO: 292 - protein, 438 aa, synthetic construct
  source 1..438: note = NLS-Keap1-(GS)5-OMOMYC peptide
PAAKRVKLDGSGSGSQPDPRPSGAGACCRFLPLQSQCPEGAGDAVMYASTECKAEVTPSQHGNRTFSYTLEDHTKQAFGIMNELRLSQQLCDVTLQVKYQDAPAAQFMAHKVVLASSSPVFKAMFTNGLREQGMEVVSIEGIHPKVMERLIEFAYTASISMGEKCVLHVMNGAVMYQIDSVVRACSDFLVQQLDPSNAIGIANFAEQIGCVELHQRAREYIYMHFGEVAKQEEFFNLSHCQLVTLISRDDLNVRCESEVFHACINWVKYDCEQRRFYVQALLRAVRCHSLTPNFLQMQLQKCEILQSDSRCKDYLVKIFEELTLHKPTQVMPCRAPGSGSGSGSGSSDTEENVKRRTHNVLERQRRNELKRSFFALRDQIPELENNEKAPKVVILKKATAYILSVQAETQKLISEIDLLRKQNEQLKHKLEQLRNSCA

SEQ ID NO: 293 - protein, 440 aa, synthetic construct
  source 1..440: note = NLS-Keap1-(GS)6-OMOMYC peptide
PAAKRVKLDGSGSGSQPDPRPSGAGACCRFLPLQSQCPEGAGDAVMYASTECKAEVTPSQHGNRTFSYTLEDHTKQAFGIMNELRLSQQLCDVTLQVKYQDAPAAQFMAHKVVLASSSPVFKAMFTNGLREQGMEVVSIEGIHPKVMERLIEFAYTASISMGEKCVLHVMNGAVMYQIDSVVRACSDFLVQQLDPSNAIGIANFAEQIGCVELHQRAREYIYMHFGEVAKQEEFFNLSHCQLVTLISRDDLNVRCESEVFHACINWVKYDCEQRRFYVQALLRAVRCHSLTPNFLQMQLQKCEILQSDSRCKDYLVKIFEELTLHKPTQVMPCRAPGSGSGSGSGSGSSDTEENVKRRTHNVLERQRRNELKRSFFALRDQIPELENNEKAPKVVILKKATAYILSVQAETQKLISEIDLLRKQNEQLKHKLEQLRNSCA

SEQ ID NO: 294 - protein, 440 aa, synthetic construct
  source 1..440: note = HA-NLS-Keap1-(GS)1-OMOMYC peptide
MYPYDVPDYAPAAKRVKLDGSGSGSQPDPRPSGAGACCRFLPLQSQCPEGAGDAVMYASTECKAEVTPSQHGNRTFSYTLEDHTKQAFGIMNELRLSQQLCDVTLQVKYQDAPAAQFMAHKVVLASSSPVFKAMFTNGLREQGMEVVSIEGIHPKVMERLIEFAYTASISMGEKCVLHVMNGAVMYQIDSVVRACSDFLVQQLDPSNAIGIANFAEQIGCVELHQRAREYIYMHFGEVAKQEEFFNLSHCQLVTLISRDDLNVRCESEVFHACINWVKYDCEQRRFYVQALLRAVRCHSLTPNFLQMQLQKCEILQSDSRCKDYLVKIFEELTLHKPTQVMPCRAPGSSDTEENVKRRTHNVLERQRRNELKRSFFALRDQIPELENNEKAPKVVILKKATAYILSVQAETQKLISEIDLLRKQNEQLKHKLEQLRNSCA

SEQ ID NO: 295 - protein, 442 aa, synthetic construct
  source 1..442: note = HA-NLS-Keap1-(GS)2-OMOMYC peptide
MYPYDVPDYAPAAKRVKLDGSGSGSQPDPRPSGAGACCRFLPLQSQCPEGAGDAVMYASTECKAEVTPSQHGNRTFSYTLEDHTKQAFGIMNELRLSQQLCDVTLQVKYQDAPAAQFMAHKVVLASSSPVFKAMFTNGLREQGMEVVSIEGIHPKVMERLIEFAYTASISMGEKCVLHVMNGAVMYQIDSVVRACSDFLVQQLDPSNAIGIANFAEQIGCVELHQRAREYIYMHFGEVAKQEEFFNLSHCQLVTLISRDDLNVRCESEVFHACINWVKYDCEQRRFYVQALLRAVRCHSLTPNFLQMQLQKCEILQSDSRCKDYLVKIFEELTLHKPTQVMPCRAPGSGSSDTEENVKRRTHNVLERQRRNELKRSFFALRDQIPELENNEKAPKVVILKKATAYILSVQAETQKLISEIDLLRKQNEQLKHKLEQLRNSCA

SEQ ID NO: 296 - protein, 444 aa, synthetic construct
  source 1..444: note = HA-NLS-Keap1-(GS)3-OMOMYC peptide
MYPYDVPDYAPAAKRVKLDGSGSGSQPDPRPSGAGACCRFLPLQSQCPEGAGDAVMYASTECKAEVTPSQHGNRTFSYTLEDHTKQAFGIMNELRLSQQLCDVTLQVKYQDAPAAQFMAHKVVLASSSPVFKAMFTNGLREQGMEVVSIEGIHPKVMERLIEFAYTASISMGEKCVLHVMNGAVMYQIDSVVRACSDFLVQQLDPSNAIGIANFAEQIGCVELHQRAREYIYMHFGEVAKQEEFFNLSHCQLVTLISRDDLNVRCESEVFHACINWVKYDCEQRRFYVQALLRAVRCHSLTPNFLQMQLQKCEILQSDSRCKDYLVKIFEELTLHKPTQVMPCRAPGSGSGSSDTEENVKRRTHNVLERQRRNELKRSFFALRDQIPELENNEKAPKVVILKKATAYILSVQAETQKLISEIDLLRKQNEQLKHKLEQLRNSCA

SEQ ID NO: 297 - protein, 446 aa, synthetic construct
  source 1..446: note = HA-NLS-Keap1-(GS)4-OMOMYC peptide
MYPYDVPDYAPAAKRVKLDGSGSGSQPDPRPSGAGACCRFLPLQSQCPEGAGDAVMYASTECKAEVTPSQHGNRTFSYTLEDHTKQAFGIMNELRLSQQLCDVTLQVKYQDAPAAQFMAHKVVLASSSPVFKAMFTNGLREQGMEVVSIEGIHPKVMERLIEFAYTASISMGEKCVLHVMNGAVMYQIDSVVRACSDFLVQQLDPSNAIGIANFAEQIGCVELHQRAREYIYMHFGEVAKQEEFFNLSHCQLVTLISRDDLNVRCESEVFHACINWVKYDCEQRRFYVQALLRAVRCHSLTPNFLQMQLQKCEILQSDSRCKDYLVKIFEELTLHKPTQVMPCRAPGSGSGSGSSDTEENVKRRTHNVLERQRRNELKRSFFALRDQIPELENNEKAPKVVILKKATAYILSVQAETQKLISEIDLLRKQNEQLKHKLEQLRNSCA

SEQ ID NO: 298 - protein, 448 aa, synthetic construct
  source 1..448: note = HA-NLS-Keap1-(GS)5-OMOMYC peptide
MYPYDVPDYAPAAKRVKLDGSGSGSQPDPRPSGAGACCRFLPLQSQCPEGAGDAVMYASTECKAEVTPSQHGNRTFSYTLEDHTKQAFGIMNELRLSQQLCDVTLQVKYQDAPAAQFMAHKVVLASSSPVFKAMFTNGLREQGMEVVSIEGIHPKVMERLIEFAYTASISMGEKCVLHVMNGAVMYQIDSVVRACSDFLVQQLDPSNAIGIANFAEQIGCVELHQRAREYIYMHFGEVAKQEEFFNLSHCQLVTLISRDDLNVRCESEVFHACINWVKYDCEQRRFYVQALLRAVRCHSLTPNFLQMQLQKCEILQSDSRCKDYLVKIFEELTLHKPTQVMPCRAPGSGSGSGSGSSDTEENVKRRTHNVLERQRRNELKRSFFALRDQIPELENNEKAPKVVILKKATAYILSVQAETQKLISEIDLLRKQNEQLKHKLEQLRNSCA

SEQ ID NO: 299 - protein, 450 aa, synthetic construct
  source 1..450: note = HA-NLS-Keap1-(GS)6-OMOMYC peptide
MYPYDVPDYAPAAKRVKLDGSGSGSQPDPRPSGAGACCRFLPLQSQCPEGAGDAVMYASTECKAEVTPSQHGNRTFSYTLEDHTKQAFGIMNELRLSQQLCDVTLQVKYQDAPAAQFMAHKVVLASSSPVFKAMFTNGLREQGMEVVSIEGIHPKVMERLIEFAYTASISMGEKCVLHVMNGAVMYQIDSVVRACSDFLVQQLDPSNAIGIANFAEQIGCVELHQRAREYIYMHFGEVAKQEEFFNLSHCQLVTLISRDDLNVRCESEVFHACINWVKYDCEQRRFYVQALLRAVRCHSLTPNFLQMQLQKCEILQSDSRCKDYLVKIFEELTLHKPTQVMPCRAPGSGSGSGSGSGSSDTEENVKRRTHNVLERQRRNELKRSFFALRDQIPELENNEKAPKVVILKKATAYILSVQAETQKLISEIDLLRKQNEQLKHKLEQLRNSCA

SEQ ID NO: 300 - protein, 236 aa, synthetic construct
  source 1..236: note = NLS-RNF125-(GS)1-OMOMYC peptide
PAAKRVKLDGSGSGSGSVLSTDSGKSAPASATARALERRRDPELPVTSFDCAVCLEVLHQPVRTRCGHVFCRSCIATSLKNNKWTCPYCRAYLPSEGVPATDVAKRMKSEYKNCAECDTLVCLSEMRAHIRTCQKYIDKYGPGSSDTEENVKRRTHNVLERQRRNELKRSFFALRDQIPELENNEKAPKVVILKKATAYILSVQAETQKLISEIDLLRKQNEQLKHKLEQLRNSCA

SEQ ID NO: 301 - protein, 238 aa, synthetic construct
  source 1..238: note = NLS-RNF125-(GS)2-OMOMYC peptide
PAAKRVKLDGSGSGSGSVLSTDSGKSAPASATARALERRRDPELPVTSFDCAVCLEVLHQPVRTRCGHVFCRSCIATSLKNNKWTCPYCRAYLPSEGVPATDVAKRMKSEYKNCAECDTLVCLSEMRAHIRTCQKYIDKYGPGSGSSDTEENVKRRTHNVLERQRRNELKRSFFALRDQIPELENNEKAPKVVILKKATAYILSVQAETQKLISEIDLLRKQNEQLKHKLEQLRNSCA

SEQ ID NO: 302 - protein, 240 aa, synthetic construct
  source 1..240: note = NLS-RNF125-(GS)3-OMOMYC peptide
PAAKRVKLDGSGSGSGSVLSTDSGKSAPASATARALERRRDPELPVTSFDCAVCLEVLHQPVRTRCGHVFCRSCIATSLKNNKWTCPYCRAYLPSEGVPATDVAKRMKSEYKNCAECDTLVCLSEMRAHIRTCQKYIDKYGPGSGSGSSDTEENVKRRTHNVLERQRRNELKRSFFALRDQIPELENNEKAPKVVILKKATAYILSVQAETQKLISEIDLLRKQNEQLKHKLEQLRNSCA

SEQ ID NO: 303 - protein, 242 aa, synthetic construct
  source 1..242: note = NLS-RNF125-(GS)4-OMOMYC peptide
PAAKRVKLDGSGSGSGSVLSTDSGKSAPASATARALERRRDPELPVTSFDCAVCLEVLHQPVRTRCGHVFCRSCIATSLKNNKWTCPYCRAYLPSEGVPATDVAKRMKSEYKNCAECDTLVCLSEMRAHIRTCQKYIDKYGPGSGSGSGSSDTEENVKRRTHNVLERQRRNELKRSFFALRDQIPELENNEKAPKVVILKKATAYILSVQAETQKLISEIDLLRKQNEQLKHKLEQLRNSCA

SEQ ID NO: 304 - protein, 244 aa, synthetic construct
  source 1..244: note = NLS-RNF125-(GS)5-OMOMYC peptide
PAAKRVKLDGSGSGSGSVLSTDSGKSAPASATARALERRRDPELPVTSFDCAVCLEVLHQPVRTRCGHVFCRSCIATSLKNNKWTCPYCRAYLPSEGVPATDVAKRMKSEYKNCAECDTLVCLSEMRAHIRTCQKYIDKYGPGSGSGSGSGSSDTEENVKRRTHNVLERQRRNELKRSFFALRDQIPELENNEKAPKVVILKKATAYILSVQAETQKLISEIDLLRKQNEQLKHKLEQLRNSCA

SEQ ID NO: 305 - protein, 246 aa, synthetic construct
  source 1..246: note = NLS-RNF125-(GS)6-OMOMYC peptide
PAAKRVKLDGSGSGSGSVLSTDSGKSAPASATARALERRRDPELPVTSFDCAVCLEVLHQPVRTRCGHVFCRSCIATSLKNNKWTCPYCRAYLPSEGVPATDVAKRMKSEYKNCAECDTLVCLSEMRAHIRTCQKYIDKYGPGSGSGSGSGSGSSDTEENVKRRTHNVLERQRRNELKRSFFALRDQIPELENNEKAPKVVILKKATAYILSVQAETQKLISEIDLLRKQNEQLKHKLEQLRNSCA

SEQ ID NO: 306 - protein, 246 aa, synthetic construct
  source 1..246: note = HA-NLS-RNF125-(GS)1-OMOMYC peptide
MYPYDVPDYAPAAKRVKLDGSGSGSGSVLSTDSGKSAPASATARALERRRDPELPVTSFDCAVCLEVLHQPVRTRCGHVFCRSCIATSLKNNKWTCPYCRAYLPSEGVPATDVAKRMKSEYKNCAECDTLVCLSEMRAHIRTCQKYIDKYGPGSSDTEENVKRRTHNVLERQRRNELKRSFFALRDQIPELENNEKAPKVVILKKATAYILSVQAETQKLISEIDLLRKQNEQLKHKLEQLRNSCA

SEQ ID NO: 307 - protein, 248 aa, synthetic construct
  source 1..248: note = HA-NLS-RNF125-(GS)2-OMOMYC peptide
MYPYDVPDYAPAAKRVKLDGSGSGSGSVLSTDSGKSAPASATARALERRRDPELPVTSFDCAVCLEVLHQPVRTRCGHVFCRSCIATSLKNNKWTCPYCRAYLPSEGVPATDVAKRMKSEYKNCAECDTLVCLSEMRAHIRTCQKYIDKYGPGSGSSDTEENVKRRTHNVLERQRRNELKRSFFALRDQIPELENNEKAPKVVILKKATAYILSVQAETQKLISEIDLLRKQNEQLKHKLEQLRNSCA

SEQ ID NO: 308 - protein, 250 aa, synthetic construct
  source 1..250: note = HA-NLS-RNF125-(GS)3-OMOMYC peptide
MYPYDVPDYAPAAKRVKLDGSGSGSGSVLSTDSGKSAPASATARALERRRDPELPVTSFDCAVCLEVLHQPVRTRCGHVFCRSCIATSLKNNKWTCPYCRAYLPSEGVPATDVAKRMKSEYKNCAECDTLVCLSEMRAHIRTCQKYIDKYGPGSGSGSSDTEENVKRRTHNVLERQRRNELKRSFFALRDQIPELENNEKAPKVVILKKATAYILSVQAETQKLISEIDLLRKQNEQLKHKLEQLRNSCA

SEQ ID NO: 309 - protein, 252 aa, synthetic construct
  source 1..252: note = HA-NLS-RNF125-(GS)4-OMOMYC peptide
MYPYDVPDYAPAAKRVKLDGSGSGSGSVLSTDSGKSAPASATARALERRRDPELPVTSFDCAVCLEVLHQPVRTRCGHVFCRSCIATSLKNNKWTCPYCRAYLPSEGVPATDVAKRMKSEYKNCAECDTLVCLSEMRAHIRTCQKYIDKYGPGSGSGSGSSDTEENVKRRTHNVLERQRRNELKRSFFALRDQIPELENNEKAPKVVILKKATAYILSVQAETQKLISEIDLLRKQNEQLKHKLEQLRNSCA

SEQ ID NO: 310 - protein, 254 aa, synthetic construct
  source 1..254: note = HA-NLS-RNF125-(GS)5-OMOMYC peptide
MYPYDVPDYAPAAKRVKLDGSGSGSGSVLSTDSGKSAPASATARALERRRDPELPVTSFDCAVCLEVLHQPVRTRCGHVFCRSCIATSLKNNKWTCPYCRAYLPSEGVPATDVAKRMKSEYKNCAECDTLVCLSEMRAHIRTCQKYIDKYGPGSGSGSGSGSSDTEENVKRRTHNVLERQRRNELKRSFFALRDQIPELENNEKAPKVVILKKATAYILSVQAETQKLISEIDLLRKQNEQLKHKLEQLRNSCA

SEQ ID NO: 311 - protein, 256 aa, synthetic construct
  source 1..256: note = HA-NLS-RNF125-(GS)6-OMOMYC peptide
MYPYDVPDYAPAAKRVKLDGSGSGSGSVLSTDSGKSAPASATARALERRRDPELPVTSFDCAVCLEVLHQPVRTRCGHVFCRSCIATSLKNNKWTCPYCRAYLPSEGVPATDVAKRMKSEYKNCAECDTLVCLSEMRAHIRTCQKYIDKYGPGSGSGSGSGSGSSDTEENVKRRTHNVLERQRRNELKRSFFALRDQIPELENNEKAPKVVILKKATAYILSVQAETQKLISEIDLLRKQNEQLKHKLEQLRNSCA

SEQ ID NO: 312 - protein, 336 aa, synthetic construct
  source 1..336: note = OMOMYC-(GS)1-SPOP-NLS peptide
MSDTEENVKRRTHNVLERQRRNELKRSFFALRDQIPELENNEKAPKVVILKKATAYILSVQAETQKLISEIDLLRKQNEQLKHKLEQLRNSCAGSNGLLPDDKLTLFCEVSVVQDSVNISGQNTMNMVKVPECRLADELGGLWENSRFTDCCLCVAGQEFQAHKAILAARSPVFSAMFEHEMEESKKNRVEINDVEPEVFKEMMCFIYTGKAPNLDKMADDLLAAADKYALERLKVMCEDALCSNLSVENAAEILILADLHSADQLKTQAVDFINYHASDVLETSGWKSMVVSHPHLVAEAYRSLASAQCPFLGPPRKRLKQSGSGSPAAKRVKLD

SEQ ID NO: 313 - protein, 338 aa, synthetic construct
  source 1..338: note = OMOMYC-(GS)2-SPOP-NLS peptide
MSDTEENVKRRTHNVLERQRRNELKRSFFALRDQIPELENNEKAPKVVILKKATAYILSVQAETQKLISEIDLLRKQNEQLKHKLEQLRNSCAGSGSNGLLPDDKLTLFCEVSVVQDSVNISGQNTMNMVKVPECRLADELGGLWENSRFTDCCLCVAGQEFQAHKAILAARSPVFSAMFEHEMEESKKNRVEINDVEPEVFKEMMCFIYTGKAPNLDKMADDLLAAADKYALERLKVMCEDALCSNLSVENAAEILILADLHSADQLKTQAVDFINYHASDVLETSGWKSMVVSHPHLVAEAYRSLASAQCPFLGPPRKRLKQSGSGSPAAKRVKLD

SEQ ID NO: 314 - protein, 340 aa, synthetic construct
  source 1..340: note = OMOMYC-(GS)3-SPOP-NLS peptide
MSDTEENVKRRTHNVLERQRRNELKRSFFALRDQIPELENNEKAPKVVILKKATAYILSVQAETQKLISEIDLLRKQNEQLKHKLEQLRNSCAGSGSGSNGLLPDDKLTLFCEVSVVQDSVNISGQNTMNMVKVPECRLADELGGLWENSRFTDCCLCVAGQEFQAHKAILAARSPVFSAMFEHEMEESKKNRVEINDVEPEVFKEMMCFIYTGKAPNLDKMADDLLAAADKYALERLKVMCEDALCSNLSVENAAEILILADLHSADQLKTQAVDFINYHASDVLETSGWKSMVVSHPHLVAEAYRSLASAQCPFLGPPRKRLKQSGSGSPAAKRVKLD

SEQ ID NO: 315 - protein, 342 aa, synthetic construct
  source 1..342: note = OMOMYC-(GS)4-SPOP-NLS peptide
MSDTEENVKRRTHNVLERQRRNELKRSFFALRDQIPELENNEKAPKVVILKKATAYILSVQAETQKLISEIDLLRKQNEQLKHKLEQLRNSCAGSGSGSGSNGLLPDDKLTLFCEVSVVQDSVNISGQNTMNMVKVPECRLADELGGLWENSRFTDCCLCVAGQEFQAHKAILAARSPVFSAMFEHEMEESKKNRVEINDVEPEVFKEMMCFIYTGKAPNLDKMADDLLAAADKYALERLKVMCEDALCSNLSVENAAEILILADLHSADQLKTQAVDFINYHASDVLETSGWKSMVVSHPHLVAEAYRSLASAQCPFLGPPRKRLKQSGSGSPAAKRVKLD

SEQ ID NO: 316 - protein, 345 aa, synthetic construct
  source 1..345: note = OMOMYC-(GS)5-SPOP-NLS peptide
MSDTEENVKRRTHNVLERQRRNELKRSFFALRDQIPELENNEKAPKVVILKKATAYILSVQAETQKLISEIDLLRKQNEQLKHKLEQLRNSCAGSGSGSGSGSNGLLPDDKLTLFCEVSVVQDSVNISGQNTMNMVKVPECRLADELGGLWENSRFTDCCLCVAGQEFQAHKAILAARSPVFSAMFEHEMEESKKNRVEINDVEPEVFKEMMCFIYTGKAPNLDKMADDLLAAADKYALERLKVMCEDALCSNLSVENAAEILILADLHSADQLKTQAVDFINYHASDVLETSGWKSMVVSHPHLVAEAYRSLASAQCPFLGPPRKRLKQSGSGSPAAKRVKLDA

SEQ ID NO: 317 - protein, 346 aa, synthetic construct
  source 1..346: note = OMOMYC-(GS)6-SPOP-NLS peptide
MSDTEENVKRRTHNVLERQRRNELKRSFFALRDQIPELENNEKAPKVVILKKATAYILSVQAETQKLISEIDLLRKQNEQLKHKLEQLRNSCAGSGSGSGSGSGSNGLLPDDKLTLFCEVSVVQDSVNISGQNTMNMVKVPECRLADELGGLWENSRFTDCCLCVAGQEFQAHKAILAARSPVFSAMFEHEMEESKKNRVEINDVEPEVFKEMMCFIYTGKAPNLDKMADDLLAAADKYALERLKVMCEDALCSNLSVENAAEILILADLHSADQLKTQAVDFINYHASDVLETSGWKSMVVSHPHLVAEAYRSLASAQCPFLGPPRKRLKQSGSGSPAAKRVKLD

SEQ ID NO: 318 - protein, 345 aa, synthetic construct
  source 1..345: note = OMOMYC-(GS)1-SPOP-NLS-HA peptide
MSDTEENVKRRTHNVLERQRRNELKRSFFALRDQIPELENNEKAPKVVILKKATAYILSVQAETQKLISEIDLLRKQNEQLKHKLEQLRNSCAGSNGLLPDDKLTLFCEVSVVQDSVNISGQNTMNMVKVPECRLADELGGLWENSRFTDCCLCVAGQEFQAHKAILAARSPVFSAMFEHEMEESKKNRVEINDVEPEVFKEMMCFIYTGKAPNLDKMADDLLAAADKYALERLKVMCEDALCSNLSVENAAEILILADLHSADQLKTQAVDFINYHASDVLETSGWKSMVVSHPHLVAEAYRSLASAQCPFLGPPRKRLKQSGSGSPAAKRVKLDYPYDVPDYA

SEQ ID NO: 319 - protein, 347 aa, synthetic construct
  source 1..347: note = OMOMYC-(GS)2-SPOP-NLS-HA peptide
MSDTEENVKRRTHNVLERQRRNELKRSFFALRDQIPELENNEKAPKVVILKKATAYILSVQAETQKLISEIDLLRKQNEQLKHKLEQLRNSCAGSGSNGLLPDDKLTLFCEVSVVQDSVNISGQNTMNMVKVPECRLADELGGLWENSRFTDCCLCVAGQEFQAHKAILAARSPVFSAMFEHEMEESKKNRVEINDVEPEVFKEMMCFIYTGKAPNLDKMADDLLAAADKYALERLKVMCEDALCSNLSVENAAEILILADLHSADQLKTQAVDFINYHASDVLETSGWKSMVVSHPHLVAEAYRSLASAQCPFLGPPRKRLKQSGSGSPAAKRVKLDYPYDVPDYA

SEQ ID NO: 320 - protein, 349 aa, synthetic construct
  source 1..349: note = OMOMYC-(GS)3-SPOP-NLS-HA peptide
MSDTEENVKRRTHNVLERQRRNELKRSFFALRDQIPELENNEKAPKVVILKKATAYILSVQAETQKLISEIDLLRKQNEQLKHKLEQLRNSCAGSGSGSNGLLPDDKLTLFCEVSVVQDSVNISGQNTMNMVKVPECRLADELGGLWENSRFTDCCLCVAGQEFQAHKAILAARSPVFSAMFEHEMEESKKNRVEINDVEPEVFKEMMCFIYTGKAPNLDKMADDLLAAADKYALERLKVMCEDALCSNLSVENAAEILILADLHSADQLKTQAVDFINYHASDVLETSGWKSMVVSHPHLVAEAYRSLASAQCPFLGPPRKRLKQSGSGSPAAKRVKLDYPYDVPDYA

SEQ ID NO: 321 - protein, 351 aa, synthetic construct
  source 1..351: note = OMOMYC-(GS)4-SPOP-NLS-HA peptide
MSDTEENVKRRTHNVLERQRRNELKRSFFALRDQIPELENNEKAPKVVILKKATAYILSVQAETQKLISEIDLLRKQNEQLKHKLEQLRNSCAGSGSGSGSNGLLPDDKLTLFCEVSVVQDSVNISGQNTMNMVKVPECRLADELGGLWENSRFTDCCLCVAGQEFQAHKAILAARSPVFSAMFEHEMEESKKNRVEINDVEPEVFKEMMCFIYTGKAPNLDKMADDLLAAADKYALERLKVMCEDALCSNLSVENAAEILILADLHSADQLKTQAVDFINYHASDVLETSGWKSMVVSHPHLVAEAYRSLASAQCPFLGPPRKRLKQSGSGSPAAKRVKLDYPYDVPDYA

SEQ ID NO: 322 - protein, 354 aa, synthetic construct
  source 1..354: note = OMOMYC-(GS)5-SPOP-NLS-HA peptide
MSDTEENVKRRTHNVLERQRRNELKRSFFALRDQIPELENNEKAPKVVILKKATAYILSVQAETQKLISEIDLLRKQNEQLKHKLEQLRNSCAGSGSGSGSGSNGLLPDDKLTLFCEVSVVQDSVNISGQNTMNMVKVPECRLADELGGLWENSRFTDCCLCVAGQEFQAHKAILAARSPVFSAMFEHEMEESKKNRVEINDVEPEVFKEMMCFIYTGKAPNLDKMADDLLAAADKYALERLKVMCEDALCSNLSVENAAEILILADLHSADQLKTQAVDFINYHASDVLETSGWKSMVVSHPHLVAEAYRSLASAQCPFLGPPRKRLKQSGSGSPAAKRVKLDYPYDVPDYAA

SEQ ID NO: 323 - protein, 355 aa, synthetic construct
  source 1..355: note = OMOMYC-(GS)6-SPOP-NLS-HA peptide
MSDTEENVKRRTHNVLERQRRNELKRSFFALRDQIPELENNEKAPKVVILKKATAYILSVQAETQKLISEIDLLRKQNEQLKHKLEQLRNSCAGSGSGSGSGSGSNGLLPDDKLTLFCEVSVVQDSVNISGQNTMNMVKVPECRLADELGGLWENSRFTDCCLCVAGQEFQAHKAILAARSPVFSAMFEHEMEESKKNRVEINDVEPEVFKEMMCFIYTGKAPNLDKMADDLLAAADKYALERLKVMCEDALCSNLSVENAAEILILADLHSADQLKTQAVDFINYHASDVLETSGWKSMVVSHPHLVAEAYRSLASAQCPFLGPPRKRLKQSGSGSPAAKRVKLDYPYDVPDYA

SEQ ID NO: 324 - protein, 279 aa, synthetic construct
  source 1..279: note = FOXP3DBD-(GS)1-CHIP-NLS peptide
MRPPFTYATLIRWAILEAPEKQRTLNEIYHWFTRMFAFFRNHPATWKNAIRHNLSLHKCFVRVESEKGAVWTVDELEFRKKRSQRPSRGSRLNFGDDIPSALRIAKKKRWNSIEERRIHQESELHSYLSRLIAAERERELEECQRNHEGDEDDSHVRAQQACIEAKHDKYMADMDELFSQVDEKRKKRDIPDYLCGKISFELMREPCITPSGITYDRKDIEEHLQRVGHFDPVTRSPLTQEQLIPNLAMKEVIDAFISENGWVEDYGSGSPAAKRVKLD

SEQ ID NO: 325 - protein, 281 aa, synthetic construct
  source 1..281: note = FOXP3DBD-(GS)2-CHIP-NLS peptide
MRPPFTYATLIRWAILEAPEKQRTLNEIYHWFTRMFAFFRNHPATWKNAIRHNLSLHKCFVRVESEKGAVWTVDELEFRKKRSQRPSRGSGSRLNFGDDIPSALRIAKKKRWNSIEERRIHQESELHSYLSRLIAAERERELEECQRNHEGDEDDSHVRAQQACIEAKHDKYMADMDELFSQVDEKRKKRDIPDYLCGKISFELMREPCITPSGITYDRKDIEEHLQRVGHFDPVTRSPLTQEQLIPNLAMKEVIDAFISENGWVEDYGSGSPAAKRVKLD

SEQ ID NO: 326 - protein, 283 aa, synthetic construct
  source 1..283: note = FOXP3DBD-(GS)3-CHIP-NLS peptide
MRPPFTYATLIRWAILEAPEKQRTLNEIYHWFTRMFAFFRNHPATWKNAIRHNLSLHKCFVRVESEKGAVWTVDELEFRKKRSQRPSRGSGSGSRLNFGDDIPSALRIAKKKRWNSIEERRIHQESELHSYLSRLIAAERERELEECQRNHEGDEDDSHVRAQQACIEAKHDKYMADMDELFSQVDEKRKKRDIPDYLCGKISFELMREPCITPSGITYDRKDIEEHLQRVGHFDPVTRSPLTQEQLIPNLAMKEVIDAFISENGWVEDYGSGSPAAKRVKLD

SEQ ID NO: 327 - protein, 285 aa, synthetic construct
  source 1..285: note = FOXP3DBD-(GS)4-CHIP-NLS peptide
MRPPFTYATLIRWAILEAPEKQRTLNEIYHWFTRMFAFFRNHPATWKNAIRHNLSLHKCFVRVESEKGAVWTVDELEFRKKRSQRPSRGSGSGSGSRLNFGDDIPSALRIAKKKRWNSIEERRIHQESELHSYLSRLIAAERERELEECQRNHEGDEDDSHVRAQQACIEAKHDKYMADMDELFSQVDEKRKKRDIPDYLCGKISFELMREPCITPSGITYDRKDIEEHLQRVGHFDPVTRSPLTQEQLIPNLAMKEVIDAFISENGWVEDYGSGSPAAKRVKLD

SEQ ID NO: 328 - protein, 287 aa, synthetic construct
  source 1..287: note = FOXP3DBD-(GS)5-CHIP-NLS peptide
MRPPFTYATLIRWAILEAPEKQRTLNEIYHWFTRMFAFFRNHPATWKNAIRHNLSLHKCFVRVESEKGAVWTVDELEFRKKRSQRPSRGSGSGSGSGSRLNFGDDIPSALRIAKKKRWNSIEERRIHQESELHSYLSRLIAAERERELEECQRNHEGDEDDSHVRAQQACIEAKHDKYMADMDELFSQVDEKRKKRDIPDYLCGKISFELMREPCITPSGITYDRKDIEEHLQRVGHFDPVTRSPLTQEQLIPNLAMKEVIDAFISENGWVEDYGSGSPAAKRVKLD

SEQ ID NO: 329 - protein, 289 aa, synthetic construct
  source 1..289: note = FOXP3DBD-(GS)6-CHIP-NLS peptide
MRPPFTYATLIRWAILEAPEKQRTLNEIYHWFTRMFAFFRNHPATWKNAIRHNLSLHKCFVRVESEKGAVWTVDELEFRKKRSQRPSRGSGSGSGSGSGSRLNFGDDIPSALRIAKKKRWNSIEERRIHQESELHSYLSRLIAAERERELEECQRNHEGDEDDSHVRAQQACIEAKHDKYMADMDELFSQVDEKRKKRDIPDYLCGKISFELMREPCITPSGITYDRKDIEEHLQRVGHFDPVTRSPLTQEQLIPNLAMKEVIDAFISENGWVEDYGSGSPAAKRVKLD

SEQ ID NO: 330 - protein, 288 aa, synthetic construct
  source 1..288: note = FOXP3DBD-(GS)1-CHIP-NLS-HA peptide
MRPPFTYATLIRWAILEAPEKQRTLNEIYHWFTRMFAFFRNHPATWKNAIRHNLSLHKCFVRVESEKGAVWTVDELEFRKKRSQRPSRGSRLNFGDDIPSALRIAKKKRWNSIEERRIHQESELHSYLSRLIAAERERELEECQRNHEGDEDDSHVRAQQACIEAKHDKYMADMDELFSQVDEKRKKRDIPDYLCGKISFELMREPCITPSGITYDRKDIEEHLQRVGHFDPVTRSPLTQEQLIPNLAMKEVIDAFISENGWVEDYGSGSPAAKRVKLDYPYDVPDYA

SEQ ID NO: 331 - protein, 290 aa, synthetic construct
  source 1..290: note = FOXP3DBD-(GS)2-CHIP-NLS-HA peptide
MRPPFTYATLIRWAILEAPEKQRTLNEIYHWFTRMFAFFRNHPATWKNAIRHNLSLHKCFVRVESEKGAVWTVDELEFRKKRSQRPSRGSGSRLNFGDDIPSALRIAKKKRWNSIEERRIHQESELHSYLSRLIAAERERELEECQRNHEGDEDDSHVRAQQACIEAKHDKYMADMDELFSQVDEKRKKRDIPDYLCGKISFELMREPCITPSGITYDRKDIEEHLQRVGHFDPVTRSPLTQEQLIPNLAMKEVIDAFISENGWVEDYGSGSPAAKRVKLDYPYDVPDYA

SEQ ID NO: 332 - protein, 292 aa, synthetic construct
  source 1..292: note = FOXP3DBD-(GS)3-CHIP-NLS-HA peptide
MRPPFTYATLIRWAILEAPEKQRTLNEIYHWFTRMFAFFRNHPATWKNAIRHNLSLHKCFVRVESEKGAVWTVDELEFRKKRSQRPSRGSGSGSRLNFGDDIPSALRIAKKKRWNSIEERRIHQESELHSYLSRLIAAERERELEECQRNHEGDEDDSHVRAQQACIEAKHDKYMADMDELFSQVDEKRKKRDIPDYLCGKISFELMREPCITPSGITYDRKDIEEHLQRVGHFDPVTRSPLTQEQLIPNLAMKEVIDAFISENGWVEDYGSGSPAAKRVKLDYPYDVPDYA

SEQ ID NO: 333 - protein, 294 aa, synthetic construct
  source 1..294: note = FOXP3DBD-(GS)4-CHIP-NLS-HA peptide
MRPPFTYATLIRWAILEAPEKQRTLNEIYHWFTRMFAFFRNHPATWKNAIRHNLSLHKCFVRVESEKGAVWTVDELEFRKKRSQRPSRGSGSGSGSRLNFGDDIPSALRIAKKKRWNSIEERRIHQESELHSYLSRLIAAERERELEECQRNHEGDEDDSHVRAQQACIEAKHDKYMADMDELFSQVDEKRKKRDIPDYLCGKISFELMREPCITPSGITYDRKDIEEHLQRVGHFDPVTRSPLTQEQLIPNLAMKEVIDAFISENGWVEDYGSGSPAAKRVKLDYPYDVPDYA

SEQ ID NO: 334 - protein, 296 aa, synthetic construct
  source 1..296: note = FOXP3DBD-(GS)5-CHIP-NLS-HA peptide
MRPPFTYATLIRWAILEAPEKQRTLNEIYHWFTRMFAFFRNHPATWKNAIRHNLSLHKCFVRVESEKGAVWTVDELEFRKKRSQRPSRGSGSGSGSGSRLNFGDDIPSALRIAKKKRWNSIEERRIHQESELHSYLSRLIAAERERELEECQRNHEGDEDDSHVRAQQACIEAKHDKYMADMDELFSQVDEKRKKRDIPDYLCGKISFELMREPCITPSGITYDRKDIEEHLQRVGHFDPVTRSPLTQEQLIPNLAMKEVIDAFISENGWVEDYGSGSPAAKRVKLDYPYDVPDYA

SEQ ID NO: 335 - protein, 298 aa, synthetic construct
  source 1..298: note = FOXP3DBD-(GS)6-CHIP-NLS-HA peptide
MRPPFTYATLIRWAILEAPEKQRTLNEIYHWFTRMFAFFRNHPATWKNAIRHNLSLHKCFVRVESEKGAVWTVDELEFRKKRSQRPSRGSGSGSGSGSGSRLNFGDDIPSALRIAKKKRWNSIEERRIHQESELHSYLSRLIAAERERELEECQRNHEGDEDDSHVRAQQACIEAKHDKYMADMDELFSQVDEKRKKRDIPDYLCGKISFELMREPCITPSGITYDRKDIEEHLQRVGHFDPVTRSPLTQEQLIPNLAMKEVIDAFISENGWVEDYGSGSPAAKRVKLDYPYDVPDYA

SEQ ID NO: 336 - protein, 139 aa, synthetic construct
  source 1..139: note = NLS-DCAF1-(GS)1-FOXP3DBD peptide
PAAKRVKLDGSGSGSQAPINFTSRLNRRASFPKYGGVDGGCFDRHLIFSRGSRPPFTYATLIRWAILEAPEKQRTLNEIYHWFTRMFAFFRNHPATWKNAIRHNLSLHKCFVRVESEKGAVWTVDELEFRKKRSQRPSR

SEQ ID NO: 337 - protein, 141 aa, synthetic construct
  source 1..141: note = NLS-DCAF1-(GS)2-FOXP3DBD peptide
PAAKRVKLDGSGSGSQAPINFTSRLNRRASFPKYGGVDGGCFDRHLIFSRGSGSRPPFTYATLIRWAILEAPEKQRTLNEIYHWFTRMFAFFRNHPATWKNAIRHNLSLHKCFVRVESEKGAVWTVDELEFRKKRSQRPSR

SEQ ID NO: 338 - protein, 143 aa, synthetic construct
  source 1..143: note = NLS-DCAF1-(GS)3-FOXP3DBD peptide
PAAKRVKLDGSGSGSQAPINFTSRLNRRASFPKYGGVDGGCFDRHLIFSRGSGSGSRPPFTYATLIRWAILEAPEKQRTLNEIYHWFTRMFAFFRNHPATWKNAIRHNLSLHKCFVRVESEKGAVWTVDELEFRKKRSQRPSR

SEQ ID NO: 339 - protein, 145 aa, synthetic construct
  source 1..145: note = NLS-DCAF1-(GS)4-FOXP3DBD peptide
PAAKRVKLDGSGSGSQAPINFTSRLNRRASFPKYGGVDGGCFDRHLIFSRGSGSGSGSRPPFTYATLIRWAILEAPEKQRTLNEIYHWFTRMFAFFRNHPATWKNAIRHNLSLHKCFVRVESEKGAVWTVDELEFRKKRSQRPSR

SEQ ID NO: 340 - protein, 147 aa, synthetic construct
  source 1..147: note = NLS-DCAF1-(GS)5-FOXP3DBD peptide
PAAKRVKLDGSGSGSQAPINFTSRLNRRASFPKYGGVDGGCFDRHLIFSRGSGSGSGSGSRPPFTYATLIRWAILEAPEKQRTLNEIYHWFTRMFAFFRNHPATWKNAIRHNLSLHKCFVRVESEKGAVWTVDELEFRKKRSQRPSR

SEQ ID NO: 341 - protein, 149 aa, synthetic construct
  source 1..149: note = NLS-DCAF1-(GS)6-FOXP3DBD peptide
PAAKRVKLDGSGSGSQAPINFTSRLNRRASFPKYGGVDGGCFDRHLIFSRGSGSGSGSGSGSRPPFTYATLIRWAILEAPEKQRTLNEIYHWFTRMFAFFRNHPATWKNAIRHNLSLHKCFVRVESEKGAVWTVDELEFRKKRSQRPSR

SEQ ID NO: 342 - protein, 149 aa, synthetic construct
  source 1..149: note = HA-NLS-DCAF1-(GS)1-FOXP3DBD peptide
MYPYDVPDYAPAAKRVKLDGSGSGSQAPINFTSRLNRRASFPKYGGVDGGCFDRHLIFSRGSRPPFTYATLIRWAILEAPEKQRTLNEIYHWFTRMFAFFRNHPATWKNAIRHNLSLHKCFVRVESEKGAVWTVDELEFRKKRSQRPSR

SEQ ID NO: 343 - protein, 151 aa, synthetic construct
  source 1..151: note = HA-NLS-DCAF1-(GS)2-FOXP3DBD peptide
MYPYDVPDYAPAAKRVKLDGSGSGSQAPINFTSRLNRRASFPKYGGVDGGCFDRHLIFSRGSGSRPPFTYATLIRWAILEAPEKQRTLNEIYHWFTRMFAFFRNHPATWKNAIRHNLSLHKCFVRVESEKGAVWTVDELEFRKKRSQRPSR

SEQ ID NO: 344 - protein, 153 aa, synthetic construct
  source 1..153: note = HA-NLS-DCAF1-(GS)3-FOXP3DBD peptide
MYPYDVPDYAPAAKRVKLDGSGSGSQAPINFTSRLNRRASFPKYGGVDGGCFDRHLIFSRGSGSGSRPPFTYATLIRWAILEAPEKQRTLNEIYHWFTRMFAFFRNHPATWKNAIRHNLSLHKCFVRVESEKGAVWTVDELEFRKKRSQRPSR

SEQ ID NO: 345 - protein, 155 aa, synthetic construct
  source 1..155: note = HA-NLS-DCAF1-(GS)4-FOXP3DBD peptide
MYPYDVPDYAPAAKRVKLDGSGSGSQAPINFTSRLNRRASFPKYGGVDGGCFDRHLIFSRGSGSGSGSRPPFTYATLIRWAILEAPEKQRTLNEIYHWFTRMFAFFRNHPATWKNAIRHNLSLHKCFVRVESEKGAVWTVDELEFRKKRSQRPSR

SEQ ID NO: 346 - protein, 157 aa, synthetic construct
  source 1..157: note = HA-NLS-DCAF1-(GS)5-FOXP3DBD peptide
MYPYDVPDYAPAAKRVKLDGSGSGSQAPINFTSRLNRRASFPKYGGVDGGCFDRHLIFSRGSGSGSGSGSRPPFTYATLIRWAILEAPEKQRTLNEIYHWFTRMFAFFRNHPATWKNAIRHNLSLHKCFVRVESEKGAVWTVDELEFRKKRSQRPSR

SEQ ID NO: 347 - protein, 159 aa, synthetic construct
  source 1..159: note = HA-NLS-DCAF1-(GS)6-FOXP3DBD peptide
MYPYDVPDYAPAAKRVKLDGSGSGSQAPINFTSRLNRRASFPKYGGVDGGCFDRHLIFSRGSGSGSGSGSGSRPPFTYATLIRWAILEAPEKQRTLNEIYHWFTRMFAFFRNHPATWKNAIRHNLSLHKCFVRVESEKGAVWTVDELEFRKKRSQRPSR

SEQ ID NO: 348 - protein, 460 aa, synthetic construct
  source 1..460: note = NLS-FOXP3DBD-(GS)1-E6AP peptide
PAAKRVKLDGSGSGSRPPFTYATLIRWAILEAPEKQRTLNEIYHWFTRMFAFFRNHPATWKNAIRHNLSLHKCFVRVESEKGAVWTVDELEFRKKRSQRPSRGSNPYLRLKVRRDHIIDDALVRLEMIAMENPADLKKQLYVEFEGEQGVDEGGVSKEFFQLVVEEIFNPDIGMFTYDESTKLFWFNPSSFETEGQFTLIGIVLGLAIYNNCILDVHFPMVVYRKLMGKKGTFRDLGDSHPVLYQSLKDLLEYEGNVEDDMMITFQISQTDLFGNPMMYDLKENGDKIPITNENRKEFVNLYSDYILNKSVEKQFKAFRRGFHMVTNESPLKYLFRPEEIELLICGSRNLDFQALEETTEYDGGYTRDSVLIREFWEIVHSFTDEQKRLFLQFTTGTDRAPVGGLGKLKMIIAKNGPDTERLPTSHTCFNVLLLPEYSSKEKLKERLLKAITYAKGFGML

SEQ ID NO: 349 - protein, 462 aa, synthetic construct
  source 1..462: note = NLS-FOXP3DBD-(GS)2-E6AP peptide
PAAKRVKLDGSGSGSRPPFTYATLIRWAILEAPEKQRTLNEIYHWFTRMFAFFRNHPATWKNAIRHNLSLHKCFVRVESEKGAVWTVDELEFRKKRSQRPSRGSGSNPYLRLKVRRDHIIDDALVRLEMIAMENPADLKKQLYVEFEGEQGVDEGGVSKEFFQLVVEEIFNPDIGMFTYDESTKLFWFNPSSFETEGQFTLIGIVLGLAIYNNCILDVHFPMVVYRKLMGKKGTFRDLGDSHPVLYQSLKDLLEYEGNVEDDMMITFQISQTDLFGNPMMYDLKENGDKIPITNENRKEFVNLYSDYILNKSVEKQFKAFRRGFHMVTNESPLKYLFRPEEIELLICGSRNLDFQALEETTEYDGGYTRDSVLIREFWEIVHSFTDEQKRLFLQFTTGTDRAPVGGLGKLKMIIAKNGPDTERLPTSHTCFNVLLLPEYSSKEKLKERLLKAITYAKGFGML

SEQ ID NO: 350 - protein, 464 aa, synthetic construct
  source 1..464: note = NLS-FOXP3DBD-(GS)3-E6AP peptide
PAAKRVKLDGSGSGSRPPFTYATLIRWAILEAPEKQRTLNEIYHWFTRMFAFFRNHPATWKNAIRHNLSLHKCFVRVESEKGAVWTVDELEFRKKRSQRPSRGSGSGSNPYLRLKVRRDHIIDDALVRLEMIAMENPADLKKQLYVEFEGEQGVDEGGVSKEFFQLVVEEIFNPDIGMFTYDESTKLFWFNPSSFETEGQFTLIGIVLGLAIYNNCILDVHFPMVVYRKLMGKKGTFRDLGDSHPVLYQSLKDLLEYEGNVEDDMMITFQISQTDLFGNPMMYDLKENGDKIPITNENRKEFVNLYSDYILNKSVEKQFKAFRRGFHMVTNESPLKYLFRPEEIELLICGSRNLDFQALEETTEYDGGYTRDSVLIREFWEIVHSFTDEQKRLFLQFTTGTDRAPVGGLGKLKMIIAKNGPDTERLPTSHTCFNVLLLPEYSSKEKLKERLLKAITYAKGFGML

SEQ ID NO: 351 - protein, 466 aa, synthetic construct
  source 1..466: note = NLS-FOXP3DBD-(GS)4-E6AP peptide
PAAKRVKLDGSGSGSRPPFTYATLIRWAILEAPEKQRTLNEIYHWFTRMFAFFRNHPATWKNAIRHNLSLHKCFVRVESEKGAVWTVDELEFRKKRSQRPSRGSGSGSGSNPYLRLKVRRDHIIDDALVRLEMIAMENPADLKKQLYVEFEGEQGVDEGGVSKEFFQLVVEEIFNPDIGMFTYDESTKLFWFNPSSFETEGQFTLIGIVLGLAIYNNCILDVHFPMVVYRKLMGKKGTFRDLGDSHPVLYQSLKDLLEYEGNVEDDMMITFQISQTDLFGNPMMYDLKENGDKIPITNENRKEFVNLYSDYILNKSVEKQFKAFRRGFHMVTNESPLKYLFRPEEIELLICGSRNLDFQALEETTEYDGGYTRDSVLIREFWEIVHSFTDEQKRLFLQFTTGTDRAPVGGLGKLKMIIAKNGPDTERLPTSHTCFNVLLLPEYSSKEKLKERLLKAITYAKGFGML

SEQ ID NO: 352 - protein, 468 aa, synthetic construct
  source 1..468: note = NLS-FOXP3DBD-(GS)5-E6AP peptide
PAAKRVKLDGSGSGSRPPFTYATLIRWAILEAPEKQRTLNEIYHWFTRMFAFFRNHPATWKNAIRHNLSLHKCFVRVESEKGAVWTVDELEFRKKRSQRPSRGSGSGSGSGSNPYLRLKVRRDHIIDDALVRLEMIAMENPADLKKQLYVEFEGEQGVDEGGVSKEFFQLVVEEIFNPDIGMFTYDESTKLFWFNPSSFETEGQFTLIGIVLGLAIYNNCILDVHFPMVVYRKLMGKKGTFRDLGDSHPVLYQSLKDLLEYEGNVEDDMMITFQISQTDLFGNPMMYDLKENGDKIPITNENRKEFVNLYSDYILNKSVEKQFKAFRRGFHMVTNESPLKYLFRPEEIELLICGSRNLDFQALEETTEYDGGYTRDSVLIREFWEIVHSFTDEQKRLFLQFTTGTDRAPVGGLGKLKMIIAKNGPDTERLPTSHTCFNVLLLPEYSSKEKLKERLLKAITYAKGFGML

SEQ ID NO: 353 - protein, 470 aa, synthetic construct
  source 1..470: note = NLS-FOXP3DBD-(GS)6-E6AP peptide
PAAKRVKLDGSGSGSRPPFTYATLIRWAILEAPEKQRTLNEIYHWFTRMFAFFRNHPATWKNAIRHNLSLHKCFVRVESEKGAVWTVDELEFRKKRSQRPSRGSGSGSGSGSGSNPYLRLKVRRDHIIDDALVRLEMIAMENPADLKKQLYVEFEGEQGVDEGGVSKEFFQLVVEEIFNPDIGMFTYDESTKLFWFNPSSFETEGQFTLIGIVLGLAIYNNCILDVHFPMVVYRKLMGKKGTFRDLGDSHPVLYQSLKDLLEYEGNVEDDMMITFQISQTDLFGNPMMYDLKENGDKIPITNENRKEFVNLYSDYILNKSVEKQFKAFRRGFHMVTNESPLKYLFRPEEIELLICGSRNLDFQALEETTEYDGGYTRDSVLIREFWEIVHSFTDEQKRLFLQFTTGTDRAPVGGLGKLKMIIAKNGPDTERLPTSHTCFNVLLLPEYSSKEKLKERLLKAITYAKGFGML

SEQ ID NO: 354 - protein, 470 aa, synthetic construct
  source 1..470: note = HA-NLS-FOXP3DBD-(GS)1-E6AP peptide
MYPYDVPDYAPAAKRVKLDGSGSGSRPPFTYATLIRWAILEAPEKQRTLNEIYHWFTRMFAFFRNHPATWKNAIRHNLSLHKCFVRVESEKGAVWTVDELEFRKKRSQRPSRGSNPYLRLKVRRDHIIDDALVRLEMIAMENPADLKKQLYVEFEGEQGVDEGGVSKEFFQLVVEEIFNPDIGMFTYDESTKLFWFNPSSFETEGQFTLIGIVLGLAIYNNCILDVHFPMVVYRKLMGKKGTFRDLGDSHPVLYQSLKDLLEYEGNVEDDMMITFQISQTDLFGNPMMYDLKENGDKIPITNENRKEFVNLYSDYILNKSVEKQFKAFRRGFHMVTNESPLKYLFRPEEIELLICGSRNLDFQALEETTEYDGGYTRDSVLIREFWEIVHSFTDEQKRLFLQFTTGTDRAPVGGLGKLKMIIAKNGPDTERLPTSHTCFNVLLLPEYSSKEKLKERLLKAITYAKGFGML

SEQ ID NO: 355 - protein, 472 aa, synthetic construct
  source 1..472: note = HA-NLS-FOXP3DBD-(GS)2-E6AP peptide
MYPYDVPDYAPAAKRVKLDGSGSGSRPPFTYATLIRWAILEAPEKQRTLNEIYHWFTRMFAFFRNHPATWKNAIRHNLSLHKCFVRVESEKGAVWTVDELEFRKKRSQRPSRGSGSNPYLRLKVRRDHIIDDALVRLEMIAMENPADLKKQLYVEFEGEQGVDEGGVSKEFFQLVVEEIFNPDIGMFTYDESTKLFWFNPSSFETEGQFTLIGIVLGLAIYNNCILDVHFPMVVYRKLMGKKGTFRDLGDSHPVLYQSLKDLLEYEGNVEDDMMITFQISQTDLFGNPMMYDLKENGDKIPITNENRKEFVNLYSDYILNKSVEKQFKAFRRGFHMVTNESPLKYLFRPEEIELLICGSRNLDFQALEETTEYDGGYTRDSVLIREFWEIVHSFTDEQKRLFLQFTTGTDRAPVGGLGKLKMIIAKNGPDTERLPTSHTCFNVLLLPEYSSKEKLKERLLKAITYAKGFGML

SEQ ID NO: 356 - protein, 474 aa, synthetic construct
  source 1..474: note = HA-NLS-FOXP3DBD-(GS)3-E6AP peptide
MYPYDVPDYAPAAKRVKLDGSGSGSRPPFTYATLIRWAILEAPEKQRTLNEIYHWFTRMFAFFRNHPATWKNAIRHNLSLHKCFVRVESEKGAVWTVDELEFRKKRSQRPSRGSGSGSNPYLRLKVRRDHIIDDALVRLEMIAMENPADLKKQLYVEFEGEQGVDEGGVSKEFFQLVVEEIFNPDIGMFTYDESTKLFWFNPSSFETEGQFTLIGIVLGLAIYNNCILDVHFPMVVYRKLMGKKGTFRDLGDSHPVLYQSLKDLLEYEGNVEDDMMITFQISQTDLFGNPMMYDLKENGDKIPITNENRKEFVNLYSDYILNKSVEKQFKAFRRGFHMVTNESPLKYLFRPEEIELLICGSRNLDFQALEETTEYDGGYTRDSVLIREFWEIVHSFTDEQKRLFLQFTTGTDRAPVGGLGKLKMIIAKNGPDTERLPTSHTCFNVLLLPEYSSKEKLKERLLKAITYAKGFGML

SEQ ID NO: 357 - protein, 476 aa, synthetic construct
  source 1..476: note = HA-NLS-FOXP3DBD-(GS)4-E6AP peptide
MYPYDVPDYAPAAKRVKLDGSGSGSRPPFTYATLIRWAILEAPEKQRTLNEIYHWFTRMFAFFRNHPATWKNAIRHNLSLHKCFVRVESEKGAVWTVDELEFRKKRSQRPSRGSGSGSGSNPYLRLKVRRDHIIDDALVRLEMIAMENPADLKKQLYVEFEGEQGVDEGGVSKEFFQLVVEEIFNPDIGMFTYDESTKLFWFNPSSFETEGQFTLIGIVLGLAIYNNCILDVHFPMVVYRKLMGKKGTFRDLGDSHPVLYQSLKDLLEYEGNVEDDMMITFQISQTDLFGNPMMYDLKENGDKIPITNENRKEFVNLYSDYILNKSVEKQFKAFRRGFHMVTNESPLKYLFRPEEIELLICGSRNLDFQALEETTEYDGGYTRDSVLIREFWEIVHSFTDEQKRLFLQFTTGTDRAPVGGLGKLKMIIAKNGPDTERLPTSHTCFNVLLLPEYSSKEKLKERLLKAITYAKGFGML

SEQ ID NO: 358 - protein, 478 aa, synthetic construct
  source 1..478: note = HA-NLS-FOXP3DBD-(GS)5-E6AP peptide
MYPYDVPDYAPAAKRVKLDGSGSGSRPPFTYATLIRWAILEAPEKQRTLNEIYHWFTRMFAFFRNHPATWKNAIRHNLSLHKCFVRVESEKGAVWTVDELEFRKKRSQRPSRGSGSGSGSGSNPYLRLKVRRDHIIDDALVRLEMIAMENPADLKKQLYVEFEGEQGVDEGGVSKEFFQLVVEEIFNPDIGMFTYDESTKLFWFNPSSFETEGQFTLIGIVLGLAIYNNCILDVHFPMVVYRKLMGKKGTFRDLGDSHPVLYQSLKDLLEYEGNVEDDMMITFQISQTDLFGNPMMYDLKENGDKIPITNENRKEFVNLYSDYILNKSVEKQFKAFRRGFHMVTNESPLKYLFRPEEIELLICGSRNLDFQALEETTEYDGGYTRDSVLIREFWEIVHSFTDEQKRLFLQFTTGTDRAPVGGLGKLKMIIAKNGPDTERLPTSHTCFNVLLLPEYSSKEKLKERLLKAITYAKGFGML

SEQ ID NO: 359 - protein, 480 aa, synthetic construct
  source 1..480: note = HA-NLS-FOXP3DBD-(GS)6-E6AP peptide
MYPYDVPDYAPAAKRVKLDGSGSGSRPPFTYATLIRWAILEAPEKQRTLNEIYHWFTRMFAFFRNHPATWKNAIRHNLSLHKCFVRVESEKGAVWTVDELEFRKKRSQRPSRGSGSGSGSGSGSNPYLRLKVRRDHIIDDALVRLEMIAMENPADLKKQLYVEFEGEQGVDEGGVSKEFFQLVVEEIFNPDIGMFTYDESTKLFWFNPSSFETEGQFTLIGIVLGLAIYNNCILDVHFPMVVYRKLMGKKGTFRDLGDSHPVLYQSLKDLLEYEGNVEDDMMITFQISQTDLFGNPMMYDLKENGDKIPITNENRKEFVNLYSDYILNKSVEKQFKAFRRGFHMVTNESPLKYLFRPEEIELLICGSRNLDFQALEETTEYDGGYTRDSVLIREFWEIVHSFTDEQKRLFLQFTTGTDRAPVGGLGKLKMIIAKNGPDTERLPTSHTCFNVLLLPEYSSKEKLKERLLKAITYAKGFGML

SEQ ID NO: 360 - protein, 456 aa, synthetic construct
  source 1..456: note = FBXW7a-(GS)1-FOXP3DBD peptide
NQELLSVGSKRRRTGGSLRGNPSSSQVDEEQMNRVVEEEQQQQLRQQEEEHTARNGEVVGVEPRPGGQNDSQQGQLEENNNRFISVDEDSSGNQEEQEEDEEHAGEQDEEDEEEEEMDQESDDFDQSDDSSREDEHTHTNSVTNSSSIVDLPVHQLSSPFYTKTTKMKRKLDHGSEVRSFSLGKKPCKVSEYTSTTGLVPCSATPTTFGDLRAANGQGQQRRRITSVQPPTGLQEWLKMFQSWSGPEKLLALDELIDSCEPTQVKHMMQVIEPQFQRDFISLLPKELALYVLSFLEPKDLLQAAQTCRYWRILAEDNLLWREKCKEEGIDEPLHIKRRKVIKPGFIHSPWKSAYIRQHRIDTNSRRGGSRPPFTYATLIRWAILEAPEKQRTLNEIYHWFTRMFAFFRNHPATWKNAIRHNLSLHKCFVRVESEKGAVWTVDELEFRKKRSQRPSR

SEQ ID NO: 361 - protein, 458 aa, synthetic construct
  source 1..458: note = FBXW7a-(GS)2-FOXP3DBD peptide
NQELLSVGSKRRRTGGSLRGNPSSSQVDEEQMNRVVEEEQQQQLRQQEEEHTARNGEVVGVEPRPGGQNDSQQGQLEENNNRFISVDEDSSGNQEEQEEDEEHAGEQDEEDEEEEEMDQESDDFDQSDDSSREDEHTHTNSVTNSSSIVDLPVHQLSSPFYTKTTKMKRKLDHGSEVRSFSLGKKPCKVSEYTSTTGLVPCSATPTTFGDLRAANGQGQQRRRITSVQPPTGLQEWLKMFQSWSGPEKLLALDELIDSCEPTQVKHMMQVIEPQFQRDFISLLPKELALYVLSFLEPKDLLQAAQTCRYWRILAEDNLLWREKCKEEGIDEPLHIKRRKVIKPGFIHSPWKSAYIRQHRIDTNSRRGGSGSRPPFTYATLIRWAILEAPEKQRTLNEIYHWFTRMFAFFRNHPATWKNAIRHNLSLHKCFVRVESEKGAVWTVDELEFRKKRSQRPSR

SEQ ID NO: 362 - protein, 460 aa, synthetic construct
  source 1..460: note = FBXW7a-(GS)3-FOXP3DBD peptide
NQELLSVGSKRRRTGGSLRGNPSSSQVDEEQMNRVVEEEQQQQLRQQEEEHTARNGEVVGVEPRPGGQNDSQQGQLEENNNRFISVDEDSSGNQEEQEEDEEHAGEQDEEDEEEEEMDQESDDFDQSDDSSREDEHTHTNSVTNSSSIVDLPVHQLSSPFYTKTTKMKRKLDHGSEVRSFSLGKKPCKVSEYTSTTGLVPCSATPTTFGDLRAANGQGQQRRRITSVQPPTGLQEWLKMFQSWSGPEKLLALDELIDSCEPTQVKHMMQVIEPQFQRDFISLLPKELALYVLSFLEPKDLLQAAQTCRYWRILAEDNLLWREKCKEEGIDEPLHIKRRKVIKPGFIHSPWKSAYIRQHRIDTNSRRGGSGSGSRPPFTYATLIRWAILEAPEKQRTLNEIYHWFTRMFAFFRNHPATWKNAIRHNLSLHKCFVRVESEKGAVWTVDELEFRKKRSQRPSR

SEQ ID NO: 363 - protein, 462 aa, synthetic construct
  source 1..462: note = FBXW7a-(GS)4-FOXP3DBD peptide
NQELLSVGSKRRRTGGSLRGNPSSSQVDEEQMNRVVEEEQQQQLRQQEEEHTARNGEVVGVEPRPGGQNDSQQGQLEENNNRFISVDEDSSGNQEEQEEDEEHAGEQDEEDEEEEEMDQESDDFDQSDDSSREDEHTHTNSVTNSSSIVDLPVHQLSSPFYTKTTKMKRKLDHGSEVRSFSLGKKPCKVSEYTSTTGLVPCSATPTTFGDLRAANGQGQQRRRITSVQPPTGLQEWLKMFQSWSGPEKLLALDELIDSCEPTQVKHMMQVIEPQFQRDFISLLPKELALYVLSFLEPKDLLQAAQTCRYWRILAEDNLLWREKCKEEGIDEPLHIKRRKVIKPGFIHSPWKSAYIRQHRIDTNSRRGGSGSGSGSRPPFTYATLIRWAILEAPEKQRTLNEIYHWFTRMFAFFRNHPATWKNAIRHNLSLHKCFVRVESEKGAVWTVDELEFRKKRSQRPSR

SEQ ID NO: 364 - protein, 464 aa, synthetic construct
  source 1..464: note = FBXW7a-(GS)5-FOXP3DBD peptide
NQELLSVGSKRRRTGGSLRGNPSSSQVDEEQMNRVVEEEQQQQLRQQEEEHTARNGEVVGVEPRPGGQNDSQQGQLEENNNRFISVDEDSSGNQEEQEEDEEHAGEQDEEDEEEEEMDQESDDFDQSDDSSREDEHTHTNSVTNSSSIVDLPVHQLSSPFYTKTTKMKRKLDHGSEVRSFSLGKKPCKVSEYTSTTGLVPCSATPTTFGDLRAANGQGQQRRRITSVQPPTGLQEWLKMFQSWSGPEKLLALDELIDSCEPTQVKHMMQVIEPQFQRDFISLLPKELALYVLSFLEPKDLLQAAQTCRYWRILAEDNLLWREKCKEEGIDEPLHIKRRKVIKPGFIHSPWKSAYIRQHRIDTNSRRGGSGSGSGSGSRPPFTYATLIRWAILEAPEKQRTLNEIYHWFTRMFAFFRNHPATWKNAIRHNLSLHKCFVRVESEKGAVWTVDELEFRKKRSQRPSR

SEQ ID NO: 365 - protein, 466 aa, synthetic construct
  source 1..466: note = FBXW7a-(GS)6-FOXP3DBD peptide
NQELLSVGSKRRRTGGSLRGNPSSSQVDEEQMNRVVEEEQQQQLRQQEEEHTARNGEVVGVEPRPGGQNDSQQGQLEENNNRFISVDEDSSGNQEEQEEDEEHAGEQDEEDEEEEEMDQESDDFDQSDDSSREDEHTHTNSVTNSSSIVDLPVHQLSSPFYTKTTKMKRKLDHGSEVRSFSLGKKPCKVSEYTSTTGLVPCSATPTTFGDLRAANGQGQQRRRITSVQPPTGLQEWLKMFQSWSGPEKLLALDELIDSCEPTQVKHMMQVIEPQFQRDFISLLPKELALYVLSFLEPKDLLQAAQTCRYWRILAEDNLLWREKCKEEGIDEPLHIKRRKVIKPGFIHSPWKSAYIRQHRIDTNSRRGGSGSGSGSGSGSRPPFTYATLIRWAILEAPEKQRTLNEIYHWFTRMFAFFRNHPATWKNAIRHNLSLHKCFVRVESEKGAVWTVDELEFRKKRSQRPSR

SEQ ID NO: 366 - protein, 466 aa, synthetic construct
  source 1..466: note = HA-FBXW7a-(GS)1-FOXP3DBD peptide
MYPYDVPDYANQELLSVGSKRRRTGGSLRGNPSSSQVDEEQMNRVVEEEQQQQLRQQEEEHTARNGEVVGVEPRPGGQNDSQQGQLEENNNRFISVDEDSSGNQEEQEEDEEHAGEQDEEDEEEEEMDQESDDFDQSDDSSREDEHTHTNSVTNSSSIVDLPVHQLSSPFYTKTTKMKRKLDHGSEVRSFSLGKKPCKVSEYTSTTGLVPCSATPTTFGDLRAANGQGQQRRRITSVQPPTGLQEWLKMFQSWSGPEKLLALDELIDSCEPTQVKHMMQVIEPQFQRDFISLLPKELALYVLSFLEPKDLLQAAQTCRYWRILAEDNLLWREKCKEEGIDEPLHIKRRKVIKPGFIHSPWKSAYIRQHRIDTNSRRGGSRPPFTYATLIRWAILEAPEKQRTLNEIYHWFTRMFAFFRNHPATWKNAIRHNLSLHKCFVRVESEKGAVWTVDELEFRKKRSQRPSR

SEQ ID NO: 367 - protein, 468 aa, synthetic construct
  source 1..468: note = HA-FBXW7a-(GS)2-FOXP3DBD peptide
MYPYDVPDYANQELLSVGSKRRRTGGSLRGNPSSSQVDEEQMNRVVEEEQQQQLRQQEEEHTARNGEVVGVEPRPGGQNDSQQGQLEENNNRFISVDEDSSGNQEEQEEDEEHAGEQDEEDEEEEEMDQESDDFDQSDDSSREDEHTHTNSVTNSSSIVDLPVHQLSSPFYTKTTKMKRKLDHGSEVRSFSLGKKPCKVSEYTSTTGLVPCSATPTTFGDLRAANGQGQQRRRITSVQPPTGLQEWLKMFQSWSGPEKLLALDELIDSCEPTQVKHMMQVIEPQFQRDFISLLPKELALYVLSFLEPKDLLQAAQTCRYWRILAEDNLLWREKCKEEGIDEPLHIKRRKVIKPGFIHSPWKSAYIRQHRIDTNSRRGGSGSRPPFTYATLIRWAILEAPEKQRTLNEIYHWFTRMFAFFRNHPATWKNAIRHNLSLHKCFVRVESEKGAVWTVDELEFRKKRSQRPSR

SEQ ID NO: 368 - protein, 470 aa, synthetic construct
  source 1..470: note = HA-FBXW7a-(GS)3-FOXP3DBD peptide
MYPYDVPDYANQELLSVGSKRRRTGGSLRGNPSSSQVDEEQMNRVVEEEQQQQLRQQEEEHTARNGEVVGVEPRPGGQNDSQQGQLEENNNRFISVDEDSSGNQEEQEEDEEHAGEQDEEDEEEEEMDQESDDFDQSDDSSREDEHTHTNSVTNSSSIVDLPVHQLSSPFYTKTTKMKRKLDHGSEVRSFSLGKKPCKVSEYTSTTGLVPCSATPTTFGDLRAANGQGQQRRRITSVQPPTGLQEWLKMFQSWSGPEKLLALDELIDSCEPTQVKHMMQVIEPQFQRDFISLLPKELALYVLSFLEPKDLLQAAQTCRYWRILAEDNLLWREKCKEEGIDEPLHIKRRKVIKPGFIHSPWKSAYIRQHRIDTNSRRGGSGSGSRPPFTYATLIRWAILEAPEKQRTLNEIYHWFTRMFAFFRNHPATWKNAIRHNLSLHKCFVRVESEKGAVWTVDELEFRKKRSQRPSR

SEQ ID NO: 369 - protein, 472 aa, synthetic construct
  source 1..472: note = HA-FBXW7a-(GS)4-FOXP3DBD peptide
MYPYDVPDYANQELLSVGSKRRRTGGSLRGNPSSSQVDEEQMNRVVEEEQQQQLRQQEEEHTARNGEVVGVEPRPGGQNDSQQGQLEENNNRFISVDEDSSGNQEEQEEDEEHAGEQDEEDEEEEEMDQESDDFDQSDDSSREDEHTHTNSVTNSSSIVDLPVHQLSSPFYTKTTKMKRKLDHGSEVRSFSLGKKPCKVSEYTSTTGLVPCSATPTTFGDLRAANGQGQQRRRITSVQPPTGLQEWLKMFQSWSGPEKLLALDELIDSCEPTQVKHMMQVIEPQFQRDFISLLPKELALYVLSFLEPKDLLQAAQTCRYWRILAEDNLLWREKCKEEGIDEPLHIKRRKVIKPGFIHSPWKSAYIRQHRIDTNSRRGGSGSGSGSRPPFTYATLIRWAILEAPEKQRTLNEIYHWFTRMFAFFRNHPATWKNAIRHNLSLHKCFVRVESEKGAVWTVDELEFRKKRSQRPSR

SEQ ID NO: 370 - protein, 474 aa, synthetic construct
  source 1..474: note = HA-FBXW7a-(GS)5-FOXP3DBD peptide
MYPYDVPDYANQELLSVGSKRRRTGGSLRGNPSSSQVDEEQMNRVVEEEQQQQLRQQEEEHTARNGEVVGVEPRPGGQNDSQQGQLEENNNRFISVDEDSSGNQEEQEEDEEHAGEQDEEDEEEEEMDQESDDFDQSDDSSREDEHTHTNSVTNSSSIVDLPVHQLSSPFYTKTTKMKRKLDHGSEVRSFSLGKKPCKVSEYTSTTGLVPCSATPTTFGDLRAANGQGQQRRRITSVQPPTGLQEWLKMFQSWSGPEKLLALDELIDSCEPTQVKHMMQVIEPQFQRDFISLLPKELALYVLSFLEPKDLLQAAQTCRYWRILAEDNLLWREKCKEEGIDEPLHIKRRKVIKPGFIHSPWKSAYIRQHRIDTNSRRGGSGSGSGSGSRPPFTYATLIRWAILEAPEKQRTLNEIYHWFTRMFAFFRNHPATWKNAIRHNLSLHKCFVRVESEKGAVWTVDELEFRKKRSQRPSR

SEQ ID NO: 371 - protein, 476 aa, synthetic construct
  source 1..476: note = HA-FBXW7a-(GS)6-FOXP3DBD peptide
MYPYDVPDYANQELLSVGSKRRRTGGSLRGNPSSSQVDEEQMNRVVEEEQQQQLRQQEEEHTARNGEVVGVEPRPGGQNDSQQGQLEENNNRFISVDEDSSGNQEEQEEDEEHAGEQDEEDEEEEEMDQESDDFDQSDDSSREDEHTHTNSVTNSSSIVDLPVHQLSSPFYTKTTKMKRKLDHGSEVRSFSLGKKPCKVSEYTSTTGLVPCSATPTTFGDLRAANGQGQQRRRITSVQPPTGLQEWLKMFQSWSGPEKLLALDELIDSCEPTQVKHMMQVIEPQFQRDFISLLPKELALYVLSFLEPKDLLQAAQTCRYWRILAEDNLLWREKCKEEGIDEPLHIKRRKVIKPGFIHSPWKSAYIRQHRIDTNSRRGGSGSGSGSGSGSRPPFTYATLIRWAILEAPEKQRTLNEIYHWFTRMFAFFRNHPATWKNAIRHNLSLHKCFVRVESEKGAVWTVDELEFRKKRSQRPSR

SEQ ID NO: 372 - protein, 425 aa, synthetic construct
  source 1..425: note = NLS-Keap1-(GS)1-FOXP3DBD peptide
PAAKRVKLDGSGSGSQPDPRPSGAGACCRFLPLQSQCPEGAGDAVMYASTECKAEVTPSQHGNRTFSYTLEDHTKQAFGIMNELRLSQQLCDVTLQVKYQDAPAAQFMAHKVVLASSSPVFKAMFTNGLREQGMEVVSIEGIHPKVMERLIEFAYTASISMGEKCVLHVMNGAVMYQIDSVVRACSDFLVQQLDPSNAIGIANFAEQIGCVELHQRAREYIYMHFGEVAKQEEFFNLSHCQLVTLISRDDLNVRCESEVFHACINWVKYDCEQRRFYVQALLRAVRCHSLTPNFLQMQLQKCEILQSDSRCKDYLVKIFEELTLHKPTQVMPCRAPGSRPPFTYATLIRWAILEAPEKQRTLNEIYHWFTRMFAFFRNHPATWKNAIRHNLSLHKCFVRVESEKGAVWTVDELEFRKKRSQRPSR

SEQ ID NO: 373 - protein, 427 aa, synthetic construct
  source 1..427: note = NLS-Keap1-(GS)2-FOXP3DBD peptide
PAAKRVKLDGSGSGSQPDPRPSGAGACCRFLPLQSQCPEGAGDAVMYASTECKAEVTPSQHGNRTFSYTLEDHTKQAFGIMNELRLSQQLCDVTLQVKYQDAPAAQFMAHKVVLASSSPVFKAMFTNGLREQGMEVVSIEGIHPKVMERLIEFAYTASISMGEKCVLHVMNGAVMYQIDSVVRACSDFLVQQLDPSNAIGIANFAEQIGCVELHQRAREYIYMHFGEVAKQEEFFNLSHCQLVTLISRDDLNVRCESEVFHACINWVKYDCEQRRFYVQALLRAVRCHSLTPNFLQMQLQKCEILQSDSRCKDYLVKIFEELTLHKPTQVMPCRAPGSGSRPPFTYATLIRWAILEAPEKQRTLNEIYHWFTRMFAFFRNHPATWKNAIRHNLSLHKCFVRVESEKGAVWTVDELEFRKKRSQRPSR

SEQ ID NO: 374 - protein, 429 aa, synthetic construct
  source 1..429: note = NLS-Keap1-(GS)3-FOXP3DBD peptide
PAAKRVKLDGSGSGSQPDPRPSGAGACCRFLPLQSQCPEGAGDAVMYASTECKAEVTPSQHGNRTFSYTLEDHTKQAFGIMNELRLSQQLCDVTLQVKYQDAPAAQFMAHKVVLASSSPVFKAMFTNGLREQGMEVVSIEGIHPKVMERLIEFAYTASISMGEKCVLHVMNGAVMYQIDSVVRACSDFLVQQLDPSNAIGIANFAEQIGCVELHQRAREYIYMHFGEVAKQEEFFNLSHCQLVTLISRDDLNVRCESEVFHACINWVKYDCEQRRFYVQALLRAVRCHSLTPNFLQMQLQKCEILQSDSRCKDYLVKIFEELTLHKPTQVMPCRAPGSGSGSRPPFTYATLIRWAILEAPEKQRTLNEIYHWFTRMFAFFRNHPATWKNAIRHNLSLHKCFVRVESEKGAVWTVDELEFRKKRSQRPSR

SEQ ID NO: 375 - protein, 431 aa, synthetic construct
  source 1..431: note = NLS-Keap1-(GS)4-FOXP3DBD peptide
PAAKRVKLDGSGSGSQPDPRPSGAGACCRFLPLQSQCPEGAGDAVMYASTECKAEVTPSQHGNRTFSYTLEDHTKQAFGIMNELRLSQQLCDVTLQVKYQDAPAAQFMAHKVVLASSSPVFKAMFTNGLREQGMEVVSIEGIHPKVMERLIEFAYTASISMGEKCVLHVMNGAVMYQIDSVVRACSDFLVQQLDPSNAIGIANFAEQIGCVELHQRAREYIYMHFGEVAKQEEFFNLSHCQLVTLISRDDLNVRCESEVFHACINWVKYDCEQRRFYVQALLRAVRCHSLTPNFLQMQLQKCEILQSDSRCKDYLVKIFEELTLHKPTQVMPCRAPGSGSGSGSRPPFTYATLIRWAILEAPEKQRTLNEIYHWFTRMFAFFRNHPATWKNAIRHNLSLHKCFVRVESEKGAVWTVDELEFRKKRSQRPSR

SEQ ID NO: 376 - protein, 433 aa, synthetic construct
  source 1..433: note = NLS-Keap1-(GS)5-FOXP3DBD peptide
PAAKRVKLDGSGSGSQPDPRPSGAGACCRFLPLQSQCPEGAGDAVMYASTECKAEVTPSQHGNRTFSYTLEDHTKQAFGIMNELRLSQQLCDVTLQVKYQDAPAAQFMAHKVVLASSSPVFKAMFTNGLREQGMEVVSIEGIHPKVMERLIEFAYTASISMGEKCVLHVMNGAVMYQIDSVVRACSDFLVQQLDPSNAIGIANFAEQIGCVELHQRAREYIYMHFGEVAKQEEFFNLSHCQLVTLISRDDLNVRCESEVFHACINWVKYDCEQRRFYVQALLRAVRCHSLTPNFLQMQLQKCEILQSDSRCKDYLVKIFEELTLHKPTQVMPCRAPGSGSGSGSGSRPPFTYATLIRWAILEAPEKQRTLNEIYHWFTRMFAFFRNHPATWKNAIRHNLSLHKCFVRVESEKGAVWTVDELEFRKKRSQRPSR

SEQ ID NO: 377 - protein, 435 aa, synthetic construct
  source 1..435: note = NLS-Keap1-(GS)6-FOXP3DBD peptide
PAAKRVKLDGSGSGSQPDPRPSGAGACCRFLPLQSQCPEGAGDAVMYASTECKAEVTPSQHGNRTFSYTLEDHTKQAFGIMNELRLSQQLCDVTLQVKYQDAPAAQFMAHKVVLASSSPVFKAMFTNGLREQGMEVVSIEGIHPKVMERLIEFAYTASISMGEKCVLHVMNGAVMYQIDSVVRACSDFLVQQLDPSNAIGIANFAEQIGCVELHQRAREYIYMHFGEVAKQEEFFNLSHCQLVTLISRDDLNVRCESEVFHACINWVKYDCEQRRFYVQALLRAVRCHSLTPNFLQMQLQKCEILQSDSRCKDYLVKIFEELTLHKPTQVMPCRAPGSGSGSGSGSGSRPPFTYATLIRWAILEAPEKQRTLNEIYHWFTRMFAFFRNHPATWKNAIRHNLSLHKCFVRVESEKGAVWTVDELEFRKKRSQRPSR

SEQ ID NO: 378 - protein, 435 aa, synthetic construct
  source 1..435: note = HA-NLS-Keap1-(GS)1-FOXP3DBD peptide
MYPYDVPDYAPAAKRVKLDGSGSGSQPDPRPSGAGACCRFLPLQSQCPEGAGDAVMYASTECKAEVTPSQHGNRTFSYTLEDHTKQAFGIMNELRLSQQLCDVTLQVKYQDAPAAQFMAHKVVLASSSPVFKAMFTNGLREQGMEVVSIEGIHPKVMERLIEFAYTASISMGEKCVLHVMNGAVMYQIDSVVRACSDFLVQQLDPSNAIGIANFAEQIGCVELHQRAREYIYMHFGEVAKQEEFFNLSHCQLVTLISRDDLNVRCESEVFHACINWVKYDCEQRRFYVQALLRAVRCHSLTPNFLQMQLQKCEILQSDSRCKDYLVKIFEELTLHKPTQVMPCRAPGSRPPFTYATLIRWAILEAPEKQRTLNEIYHWFTRMFAFFRNHPATWKNAIRHNLSLHKCFVRVESEKGAVWTVDELEFRKKRSQRPSR

SEQ ID NO: 379 - protein, 437 aa, synthetic construct
  source 1..437: note = HA-NLS-Keap1-(GS)2-FOXP3DBD peptide
MYPYDVPDYAPAAKRVKLDGSGSGSQPDPRPSGAGACCRFLPLQSQCPEGAGDAVMYASTECKAEVTPSQHGNRTFSYTLEDHTKQAFGIMNELRLSQQLCDVTLQVKYQDAPAAQFMAHKVVLASSSPVFKAMFTNGLREQGMEVVSIEGIHPKVMERLIEFAYTASISMGEKCVLHVMNGAVMYQIDSVVRACSDFLVQQLDPSNAIGIANFAEQIGCVELHQRAREYIYMHFGEVAKQEEFFNLSHCQLVTLISRDDLNVRCESEVFHACINWVKYDCEQRRFYVQALLRAVRCHSLTPNFLQMQLQKCEILQSDSRCKDYLVKIFEELTLHKPTQVMPCRAPGSGSRPPFTYATLIRWAILEAPEKQRTLNEIYHWFTRMFAFFRNHPATWKNAIRHNLSLHKCFVRVESEKGAVWTVDELEFRKKRSQRPSR

SEQ ID NO: 380 - protein, 439 aa, synthetic construct
  source 1..439: note = HA-NLS-Keap1-(GS)3-FOXP3DBD peptide
MYPYDVPDYAPAAKRVKLDGSGSGSQPDPRPSGAGACCRFLPLQSQCPEGAGDAVMYASTECKAEVTPSQHGNRTFSYTLEDHTKQAFGIMNELRLSQQLCDVTLQVKYQDAPAAQFMAHKVVLASSSPVFKAMFTNGLREQGMEVVSIEGIHPKVMERLIEFAYTASISMGEKCVLHVMNGAVMYQIDSVVRACSDFLVQQLDPSNAIGIANFAEQIGCVELHQRAREYIYMHFGEVAKQEEFFNLSHCQLVTLISRDDLNVRCESEVFHACINWVKYDCEQRRFYVQALLRAVRCHSLTPNFLQMQLQKCEILQSDSRCKDYLVKIFEELTLHKPTQVMPCRAPGSGSGSRPPFTYATLIRWAILEAPEKQRTLNEIYHWFTRMFAFFRNHPATWKNAIRHNLSLHKCFVRVESEKGAVWTVDELEFRKKRSQRPSR

SEQ ID NO: 381 - protein, 441 aa, synthetic construct
  source 1..441: note = HA-NLS-Keap1-(GS)4-FOXP3DBD peptide
MYPYDVPDYAPAAKRVKLDGSGSGSQPDPRPSGAGACCRFLPLQSQCPEGAGDAVMYASTECKAEVTPSQHGNRTFSYTLEDHTKQAFGIMNELRLSQQLCDVTLQVKYQDAPAAQFMAHKVVLASSSPVFKAMFTNGLREQGMEVVSIEGIHPKVMERLIEFAYTASISMGEKCVLHVMNGAVMYQIDSVVRACSDFLVQQLDPSNAIGIANFAEQIGCVELHQRAREYIYMHFGEVAKQEEFFNLSHCQLVTLISRDDLNVRCESEVFHACINWVKYDCEQRRFYVQALLRAVRCHSLTPNFLQMQLQKCEILQSDSRCKDYLVKIFEELTLHKPTQVMPCRAPGSGSGSGSRPPFTYATLIRWAILEAPEKQRTLNEIYHWFTRMFAFFRNHPATWKNAIRHNLSLHKCFVRVESEKGAVWTVDELEFRKKRSQRPSR

SEQ ID NO: 382 - protein, 443 aa, synthetic construct
  source 1..443: note = HA-NLS-Keap1-(GS)5-FOXP3DBD peptide
MYPYDVPDYAPAAKRVKLDGSGSGSQPDPRPSGAGACCRFLPLQSQCPEGAGDAVMYASTECKAEVTPSQHGNRTFSYTLEDHTKQAFGIMNELRLSQQLCDVTLQVKYQDAPAAQFMAHKVVLASSSPVFKAMFTNGLREQGMEVVSIEGIHPKVMERLIEFAYTASISMGEKCVLHVMNGAVMYQIDSVVRACSDFLVQQLDPSNAIGIANFAEQIGCVELHQRAREYIYMHFGEVAKQEEFFNLSHCQLVTLISRDDLNVRCESEVFHACINWVKYDCEQRRFYVQALLRAVRCHSLTPNFLQMQLQKCEILQSDSRCKDYLVKIFEELTLHKPTQVMPCRAPGSGSGSGSGSRPPFTYATLIRWAILEAPEKQRTLNEIYHWFTRMFAFFRNHPATWKNAIRHNLSLHKCFVRVESEKGAVWTVDELEFRKKRSQRPSR

SEQ ID NO: 383 - protein, 445 aa, synthetic construct
  source 1..445: note = HA-NLS-Keap1-(GS)6-FOXP3DBD peptide
MYPYDVPDYAPAAKRVKLDGSGSGSQPDPRPSGAGACCRFLPLQSQCPEGAGDAVMYASTECKAEVTPSQHGNRTFSYTLEDHTKQAFGIMNELRLSQQLCDVTLQVKYQDAPAAQFMAHKVVLASSSPVFKAMFTNGLREQGMEVVSIEGIHPKVMERLIEFAYTASISMGEKCVLHVMNGAVMYQIDSVVRACSDFLVQQLDPSNAIGIANFAEQIGCVELHQRAREYIYMHFGEVAKQEEFFNLSHCQLVTLISRDDLNVRCESEVFHACINWVKYDCEQRRFYVQALLRAVRCHSLTPNFLQMQLQKCEILQSDSRCKDYLVKIFEELTLHKPTQVMPCRAPGSGSGSGSGSGSRPPFTYATLIRWAILEAPEKQRTLNEIYHWFTRMFAFFRNHPATWKNAIRHNLSLHKCFVRVESEKGAVWTVDELEFRKKRSQRPSR

SEQ ID NO: 384 - protein, 231 aa, synthetic construct
  source 1..231: note = NLS-RNF125-(GS)1-FOXP3DBD peptide
PAAKRVKLDGSGSGSGSVLSTDSGKSAPASATARALERRRDPELPVTSFDCAVCLEVLHQPVRTRCGHVFCRSCIATSLKNNKWTCPYCRAYLPSEGVPATDVAKRMKSEYKNCAECDTLVCLSEMRAHIRTCQKYIDKYGPGSRPPFTYATLIRWAILEAPEKQRTLNEIYHWFTRMFAFFRNHPATWKNAIRHNLSLHKCFVRVESEKGAVWTVDELEFRKKRSQRPSR

SEQ ID NO: 385 - protein, 233 aa, synthetic construct
  source 1..233: note = NLS-RNF125-(GS)2-FOXP3DBD peptide
PAAKRVKLDGSGSGSGSVLSTDSGKSAPASATARALERRRDPELPVTSFDCAVCLEVLHQPVRTRCGHVFCRSCIATSLKNNKWTCPYCRAYLPSEGVPATDVAKRMKSEYKNCAECDTLVCLSEMRAHIRTCQKYIDKYGPGSGSRPPFTYATLIRWAILEAPEKQRTLNEIYHWFTRMFAFFRNHPATWKNAIRHNLSLHKCFVRVESEKGAVWTVDELEFRKKRSQRPSR

SEQ ID NO: 386 - protein, 235 aa, synthetic construct
  source 1..235: note = NLS-RNF125-(GS)3-FOXP3DBD peptide
PAAKRVKLDGSGSGSGSVLSTDSGKSAPASATARALERRRDPELPVTSFDCAVCLEVLHQPVRTRCGHVFCRSCIATSLKNNKWTCPYCRAYLPSEGVPATDVAKRMKSEYKNCAECDTLVCLSEMRAHIRTCQKYIDKYGPGSGSGSRPPFTYATLIRWAILEAPEKQRTLNEIYHWFTRMFAFFRNHPATWKNAIRHNLSLHKCFVRVESEKGAVWTVDELEFRKKRSQRPSR

SEQ ID NO: 387 - protein, 237 aa, synthetic construct
  source 1..237: note = NLS-RNF125-(GS)4-FOXP3DBD peptide
PAAKRVKLDGSGSGSGSVLSTDSGKSAPASATARALERRRDPELPVTSFDCAVCLEVLHQPVRTRCGHVFCRSCIATSLKNNKWTCPYCRAYLPSEGVPATDVAKRMKSEYKNCAECDTLVCLSEMRAHIRTCQKYIDKYGPGSGSGSGSRPPFTYATLIRWAILEAPEKQRTLNEIYHWFTRMFAFFRNHPATWKNAIRHNLSLHKCFVRVESEKGAVWTVDELEFRKKRSQRPSR

SEQ ID NO: 388 - protein, 239 aa, synthetic construct
  source 1..239: note = NLS-RNF125-(GS)5-FOXP3DBD peptide
PAAKRVKLDGSGSGSGSVLSTDSGKSAPASATARALERRRDPELPVTSFDCAVCLEVLHQPVRTRCGHVFCRSCIATSLKNNKWTCPYCRAYLPSEGVPATDVAKRMKSEYKNCAECDTLVCLSEMRAHIRTCQKYIDKYGPGSGSGSGSGSRPPFTYATLIRWAILEAPEKQRTLNEIYHWFTRMFAFFRNHPATWKNAIRHNLSLHKCFVRVESEKGAVWTVDELEFRKKRSQRPSR

SEQ ID NO: 389 - protein, 241 aa, synthetic construct
  source 1..241: note = NLS-RNF125-(GS)6-FOXP3DBD peptide
PAAKRVKLDGSGSGSGSVLSTDSGKSAPASATARALERRRDPELPVTSFDCAVCLEVLHQPVRTRCGHVFCRSCIATSLKNNKWTCPYCRAYLPSEGVPATDVAKRMKSEYKNCAECDTLVCLSEMRAHIRTCQKYIDKYGPGSGSGSGSGSGSRPPFTYATLIRWAILEAPEKQRTLNEIYHWFTRMFAFFRNHPATWKNAIRHNLSLHKCFVRVESEKGAVWTVDELEFRKKRSQRPSR

SEQ ID NO: 390 - protein, 241 aa, synthetic construct
  source 1..241: note = HA-NLS-RNF125-(GS)1-FOXP3DBD peptide
MYPYDVPDYAPAAKRVKLDGSGSGSGSVLSTDSGKSAPASATARALERRRDPELPVTSFDCAVCLEVLHQPVRTRCGHVFCRSCIATSLKNNKWTCPYCRAYLPSEGVPATDVAKRMKSEYKNCAECDTLVCLSEMRAHIRTCQKYIDKYGPGSRPPFTYATLIRWAILEAPEKQRTLNEIYHWFTRMFAFFRNHPATWKNAIRHNLSLHKCFVRVESEKGAVWTVDELEFRKKRSQRPSR

SEQ ID NO: 391 - protein, 243 aa, synthetic construct
  source 1..243: note = HA-NLS-RNF125-(GS)2-FOXP3DBD peptide
MYPYDVPDYAPAAKRVKLDGSGSGSGSVLSTDSGKSAPASATARALERRRDPELPVTSFDCAVCLEVLHQPVRTRCGHVFCRSCIATSLKNNKWTCPYCRAYLPSEGVPATDVAKRMKSEYKNCAECDTLVCLSEMRAHIRTCQKYIDKYGPGSGSRPPFTYATLIRWAILEAPEKQRTLNEIYHWFTRMFAFFRNHPATWKNAIRHNLSLHKCFVRVESEKGAVWTVDELEFRKKRSQRPSR

SEQ ID NO: 392 - protein, 245 aa, synthetic construct
  source 1..245: note = HA-NLS-RNF125-(GS)3-FOXP3DBD peptide
MYPYDVPDYAPAAKRVKLDGSGSGSGSVLSTDSGKSAPASATARALERRRDPELPVTSFDCAVCLEVLHQPVRTRCGHVFCRSCIATSLKNNKWTCPYCRAYLPSEGVPATDVAKRMKSEYKNCAECDTLVCLSEMRAHIRTCQKYIDKYGPGSGSGSRPPFTYATLIRWAILEAPEKQRTLNEIYHWFTRMFAFFRNHPATWKNAIRHNLSLHKCFVRVESEKGAVWTVDELEFRKKRSQRPSR

SEQ ID NO: 393 - protein, 247 aa, synthetic construct
  source 1..247: note = HA-NLS-RNF125-(GS)4-FOXP3DBD peptide
MYPYDVPDYAPAAKRVKLDGSGSGSGSVLSTDSGKSAPASATARALERRRDPELPVTSFDCAVCLEVLHQPVRTRCGHVFCRSCIATSLKNNKWTCPYCRAYLPSEGVPATDVAKRMKSEYKNCAECDTLVCLSEMRAHIRTCQKYIDKYGPGSGSGSGSRPPFTYATLIRWAILEAPEKQRTLNEIYHWFTRMFAFFRNHPATWKNAIRHNLSLHKCFVRVESEKGAVWTVDELEFRKKRSQRPSR

SEQ ID NO: 394 - protein, 249 aa, synthetic construct
  source 1..249: note = HA-NLS-RNF125-(GS)5-FOXP3DBD peptide
MYPYDVPDYAPAAKRVKLDGSGSGSGSVLSTDSGKSAPASATARALERRRDPELPVTSFDCAVCLEVLHQPVRTRCGHVFCRSCIATSLKNNKWTCPYCRAYLPSEGVPATDVAKRMKSEYKNCAECDTLVCLSEMRAHIRTCQKYIDKYGPGSGSGSGSGSRPPFTYATLIRWAILEAPEKQRTLNEIYHWFTRMFAFFRNHPATWKNAIRHNLSLHKCFVRVESEKGAVWTVDELEFRKKRSQRPSR

SEQ ID NO: 395 - protein, 251 aa, synthetic construct
  source 1..251: note = HA-NLS-RNF125-(GS)6-FOXP3DBD peptide
MYPYDVPDYAPAAKRVKLDGSGSGSGSVLSTDSGKSAPASATARALERRRDPELPVTSFDCAVCLEVLHQPVRTRCGHVFCRSCIATSLKNNKWTCPYCRAYLPSEGVPATDVAKRMKSEYKNCAECDTLVCLSEMRAHIRTCQKYIDKYGPGSGSGSGSGSGSRPPFTYATLIRWAILEAPEKQRTLNEIYHWFTRMFAFFRNHPATWKNAIRHNLSLHKCFVRVESEKGAVWTVDELEFRKKRSQRPSR

SEQ ID NO: 396 - protein, 331 aa, synthetic construct
  source 1..331: note = FOXP3DBD-(GS)1-SPOP-NLS peptide
MRPPFTYATLIRWAILEAPEKQRTLNEIYHWFTRMFAFFRNHPATWKNAIRHNLSLHKCFVRVESEKGAVWTVDELEFRKKRSQRPSRGSNGLLPDDKLTLFCEVSVVQDSVNISGQNTMNMVKVPECRLADELGGLWENSRFTDCCLCVAGQEFQAHKAILAARSPVFSAMFEHEMEESKKNRVEINDVEPEVFKEMMCFIYTGKAPNLDKMADDLLAAADKYALERLKVMCEDALCSNLSVENAAEILILADLHSADQLKTQAVDFINYHASDVLETSGWKSMVVSHPHLVAEAYRSLASAQCPFLGPPRKRLKQSGSGSPAAKRVKLD

SEQ ID NO: 397 - protein, 333 aa, synthetic construct
  source 1..333: note = FOXP3DBD-(GS)2-SPOP-NLS peptide
MRPPFTYATLIRWAILEAPEKQRTLNEIYHWFTRMFAFFRNHPATWKNAIRHNLSLHKCFVRVESEKGAVWTVDELEFRKKRSQRPSRGSGSNGLLPDDKLTLFCEVSVVQDSVNISGQNTMNMVKVPECRLADELGGLWENSRFTDCCLCVAGQEFQAHKAILAARSPVFSAMFEHEMEESKKNRVEINDVEPEVFKEMMCFIYTGKAPNLDKMADDLLAAADKYALERLKVMCEDALCSNLSVENAAEILILADLHSADQLKTQAVDFINYHASDVLETSGWKSMVVSHPHLVAEAYRSLASAQCPFLGPPRKRLKQSGSGSPAAKRVKLD

SEQ ID NO: 398 - protein, 335 aa, synthetic construct
  source 1..335: note = FOXP3DBD-(GS)3-SPOP-NLS peptide
MRPPFTYATLIRWAILEAPEKQRTLNEIYHWFTRMFAFFRNHPATWKNAIRHNLSLHKCFVRVESEKGAVWTVDELEFRKKRSQRPSRGSGSGSNGLLPDDKLTLFCEVSVVQDSVNISGQNTMNMVKVPECRLADELGGLWENSRFTDCCLCVAGQEFQAHKAILAARSPVFSAMFEHEMEESKKNRVEINDVEPEVFKEMMCFIYTGKAPNLDKMADDLLAAADKYALERLKVMCEDALCSNLSVENAAEILILADLHSADQLKTQAVDFINYHASDVLETSGWKSMVVSHPHLVAEAYRSLASAQCPFLGPPRKRLKQSGSGSPAAKRVKLD

SEQ ID NO: 399 - protein, 337 aa, synthetic construct
  source 1..337: note = FOXP3DBD-(GS)4-SPOP-NLS peptide
MRPPFTYATLIRWAILEAPEKQRTLNEIYHWFTRMFAFFRNHPATWKNAIRHNLSLHKCFVRVESEKGAVWTVDELEFRKKRSQRPSRGSGSGSGSNGLLPDDKLTLFCEVSVVQDSVNISGQNTMNMVKVPECRLADELGGLWENSRFTDCCLCVAGQEFQAHKAILAARSPVFSAMFEHEMEESKKNRVEINDVEPEVFKEMMCFIYTGKAPNLDKMADDLLAAADKYALERLKVMCEDALCSNLSVENAAEILILADLHSADQLKTQAVDFINYHASDVLETSGWKSMVVSHPHLVAEAYRSLASAQCPFLGPPRKRLKQSGSGSPAAKRVKLD

SEQ ID NO: 400 - protein, 340 aa, synthetic construct
  source 1..340: note = FOXP3DBD-(GS)5-SPOP-NLS peptide
MRPPFTYATLIRWAILEAPEKQRTLNEIYHWFTRMFAFFRNHPATWKNAIRHNLSLHKCFVRVESEKGAVWTVDELEFRKKRSQRPSRGSGSGSGSGSNGLLPDDKLTLFCEVSVVQDSVNISGQNTMNMVKVPECRLADELGGLWENSRFTDCCLCVAGQEFQAHKAILAARSPVFSAMFEHEMEESKKNRVEINDVEPEVFKEMMCFIYTGKAPNLDKMADDLLAAADKYALERLKVMCEDALCSNLSVENAAEILILADLHSADQLKTQAVDFINYHASDVLETSGWKSMVVSHPHLVAEAYRSLASAQCPFLGPPRKRLKQSGSGSPAAKRVKLDA

SEQ ID NO: 401 - protein, 341 aa, synthetic construct
  source 1..341: note = FOXP3DBD-(GS)6-SPOP-NLS peptide
MRPPFTYATLIRWAILEAPEKQRTLNEIYHWFTRMFAFFRNHPATWKNAIRHNLSLHKCFVRVESEKGAVWTVDELEFRKKRSQRPSRGSGSGSGSGSGSNGLLPDDKLTLFCEVSVVQDSVNISGQNTMNMVKVPECRLADELGGLWENSRFTDCCLCVAGQEFQAHKAILAARSPVFSAMFEHEMEESKKNRVEINDVEPEVFKEMMCFIYTGKAPNLDKMADDLLAAADKYALERLKVMCEDALCSNLSVENAAEILILADLHSADQLKTQAVDFINYHASDVLETSGWKSMVVSHPHLVAEAYRSLASAQCPFLGPPRKRLKQSGSGSPAAKRVKLD

SEQ ID NO: 402 - protein, 340 aa, synthetic construct
  source 1..340: note = FOXP3DBD-(GS)1-SPOP-NLS-HA peptide
MRPPFTYATLIRWAILEAPEKQRTLNEIYHWFTRMFAFFRNHPATWKNAIRHNLSLHKCFVRVESEKGAVWTVDELEFRKKRSQRPSRGSNGLLPDDKLTLFCEVSVVQDSVNISGQNTMNMVKVPECRLADELGGLWENSRFTDCCLCVAGQEFQAHKAILAARSPVFSAMFEHEMEESKKNRVEINDVEPEVFKEMMCFIYTGKAPNLDKMADDLLAAADKYALERLKVMCEDALCSNLSVENAAEILILADLHSADQLKTQAVDFINYHASDVLETSGWKSMVVSHPHLVAEAYRSLASAQCPFLGPPRKRLKQSGSGSPAAKRVKLDYPYDVPDYA

SEQ ID NO: 403 - protein, 342 aa, synthetic construct
  source 1..342: note = FOXP3DBD-(GS)2-SPOP-NLS-HA peptide
MRPPFTYATLIRWAILEAPEKQRTLNEIYHWFTRMFAFFRNHPATWKNAIRHNLSLHKCFVRVESEKGAVWTVDELEFRKKRSQRPSRGSGSNGLLPDDKLTLFCEVSVVQDSVNISGQNTMNMVKVPECRLADELGGLWENSRFTDCCLCVAGQEFQAHKAILAARSPVFSAMFEHEMEESKKNRVEINDVEPEVFKEMMCFIYTGKAPNLDKMADDLLAAADKYALERLKVMCEDALCSNLSVENAAEILILADLHSADQLKTQAVDFINYHASDVLETSGWKSMVVSHPHLVAEAYRSLASAQCPFLGPPRKRLKQSGSGSPAAKRVKLDYPYDVPDYA

SEQ ID NO: 404 - protein, 344 aa, synthetic construct
  source 1..344: note = FOXP3DBD-(GS)3-SPOP-NLS-HA peptide
MRPPFTYATLIRWAILEAPEKQRTLNEIYHWFTRMFAFFRNHPATWKNAIRHNLSLHKCFVRVESEKGAVWTVDELEFRKKRSQRPSRGSGSGSNGLLPDDKLTLFCEVSVVQDSVNISGQNTMNMVKVPECRLADELGGLWENSRFTDCCLCVAGQEFQAHKAILAARSPVFSAMFEHEMEESKKNRVEINDVEPEVFKEMMCFIYTGKAPNLDKMADDLLAAADKYALERLKVMCEDALCSNLSVENAAEILILADLHSADQLKTQAVDFINYHASDVLETSGWKSMVVSHPHLVAEAYRSLASAQCPFLGPPRKRLKQSGSGSPAAKRVKLDYPYDVPDYA

SEQ ID NO: 405 - protein, 346 aa, synthetic construct
  source 1..346: note = FOXP3DBD-(GS)4-SPOP-NLS-HA peptide
MRPPFTYATLIRWAILEAPEKQRTLNEIYHWFTRMFAFFRNHPATWKNAIRHNLSLHKCFVRVESEKGAVWTVDELEFRKKRSQRPSRGSGSGSGSNGLLPDDKLTLFCEVSVVQDSVNISGQNTMNMVKVPECRLADELGGLWENSRFTDCCLCVAGQEFQAHKAILAARSPVFSAMFEHEMEESKKNRVEINDVEPEVFKEMMCFIYTGKAPNLDKMADDLLAAADKYALERLKVMCEDALCSNLSVENAAEILILADLHSADQLKTQAVDFINYHASDVLETSGWKSMVVSHPHLVAEAYRSLASAQCPFLGPPRKRLKQSGSGSPAAKRVKLDYPYDVPDYA

SEQ ID NO: 406 - protein, 349 aa, synthetic construct
  source 1..349: note = FOXP3DBD-(GS)5-SPOP-NLS-HA peptide
MRPPFTYATLIRWAILEAPEKQRTLNEIYHWFTRMFAFFRNHPATWKNAIRHNLSLHKCFVRVESEKGAVWTVDELEFRKKRSQRPSRGSGSGSGSGSNGLLPDDKLTLFCEVSVVQDSVNISGQNTMNMVKVPECRLADELGGLWENSRFTDCCLCVAGQEFQAHKAILAARSPVFSAMFEHEMEESKKNRVEINDVEPEVFKEMMCFIYTGKAPNLDKMADDLLAAADKYALERLKVMCEDALCSNLSVENAAEILILADLHSADQLKTQAVDFINYHASDVLETSGWKSMVVSHPHLVAEAYRSLASAQCPFLGPPRKRLKQSGSGSPAAKRVKLDYPYDVPDYAA

SEQ ID NO: 407 - protein, 350 aa, synthetic construct
  source 1..350: note = FOXP3DBD-(GS)6-SPOP-NLS-HA peptide
MRPPFTYATLIRWAILEAPEKQRTLNEIYHWFTRMFAFFRNHPATWKNAIRHNLSLHKCFVRVESEKGAVWTVDELEFRKKRSQRPSRGSGSGSGSGSGSNGLLPDDKLTLFCEVSVVQDSVNISGQNTMNMVKVPECRLADELGGLWENSRFTDCCLCVAGQEFQAHKAILAARSPVFSAMFEHEMEESKKNRVEINDVEPEVFKEMMCFIYTGKAPNLDKMADDLLAAADKYALERLKVMCEDALCSNLSVENAAEILILADLHSADQLKTQAVDFINYHASDVLETSGWKSMVVSHPHLVAEAYRSLASAQCPFLGPPRKRLKQSGSGSPAAKRVKLDYPYDVPDYA

SEQ ID NO: 408 - protein, 306 aa, synthetic construct
  source 1..306: note = VL12.3-(GS)1-CHIP-NLS peptide
MGSQPVLTQSPSVSAAPRQRVTISVSGSNSNIGSNTVNWIQQLPGRAPELLMYDDDLLAPGVSDRFSGSRSGTSASLTISGLQSEDEADYYAATWDDSLNGWVFGGGTKVTVLSGGSRLNFGDDIPSALRIAKKKRWNSIEERRIHQESELHSYLSRLIAAERERELEECQRNHEGDEDDSHVRAQQACIEAKHDKYMADMDELFSQVDEKRKKRDIPDYLCGKISFELMREPCITPSGITYDRKDIEEHLQRVGHFDPVTRSPLTQEQLIPNLAMKEVIDAFISENGWVEDYGSGSPAAKRVKLD

SEQ ID NO: 409 - protein, 308 aa, synthetic construct
  source 1..308: note = VL12.3-(GS)2-CHIP-NLS peptide
MGSQPVLTQSPSVSAAPRQRVTISVSGSNSNIGSNTVNWIQQLPGRAPELLMYDDDLLAPGVSDRFSGSRSGTSASLTISGLQSEDEADYYAATWDDSLNGWVFGGGTKVTVLSGGSGSRLNFGDDIPSALRIAKKKRWNSIEERRIHQESELHSYLSRLIAAERERELEECQRNHEGDEDDSHVRAQQACIEAKHDKYMADMDELFSQVDEKRKKRDIPDYLCGKISFELMREPCITPSGITYDRKDIEEHLQRVGHFDPVTRSPLTQEQLIPNLAMKEVIDAFISENGWVEDYGSGSPAAKRVKLD

SEQ ID NO: 410 - protein, 310 aa, synthetic construct
  source 1..310: note = VL12.3-(GS)3-CHIP-NLS peptide
MGSQPVLTQSPSVSAAPRQRVTISVSGSNSNIGSNTVNWIQQLPGRAPELLMYDDDLLAPGVSDRFSGSRSGTSASLTISGLQSEDEADYYAATWDDSLNGWVFGGGTKVTVLSGGSGSGSRLNFGDDIPSALRIAKKKRWNSIEERRIHQESELHSYLSRLIAAERERELEECQRNHEGDEDDSHVRAQQACIEAKHDKYMADMDELFSQVDEKRKKRDIPDYLCGKISFELMREPCITPSGITYDRKDIEEHLQRVGHFDPVTRSPLTQEQLIPNLAMKEVIDAFISENGWVEDYGSGSPAAKRVKLD

SEQ ID NO: 411 - protein, 312 aa, synthetic construct
  source 1..312: note = VL12.3-(GS)4-CHIP-NLS peptide
MGSQPVLTQSPSVSAAPRQRVTISVSGSNSNIGSNTVNWIQQLPGRAPELLMYDDDLLAPGVSDRFSGSRSGTSASLTISGLQSEDEADYYAATWDDSLNGWVFGGGTKVTVLSGGSGSGSGSRLNFGDDIPSALRIAKKKRWNSIEERRIHQESELHSYLSRLIAAERERELEECQRNHEGDEDDSHVRAQQACIEAKHDKYMADMDELFSQVDEKRKKRDIPDYLCGKISFELMREPCITPSGITYDRKDIEEHLQRVGHFDPVTRSPLTQEQLIPNLAMKEVIDAFISENGWVEDYGSGSPAAKRVKLD

SEQ ID NO: 412 - protein, 314 aa, synthetic construct
  source 1..314: note = VL12.3-(GS)5-CHIP-NLS peptide
MGSQPVLTQSPSVSAAPRQRVTISVSGSNSNIGSNTVNWIQQLPGRAPELLMYDDDLLAPGVSDRFSGSRSGTSASLTISGLQSEDEADYYAATWDDSLNGWVFGGGTKVTVLSGGSGSGSGSGSRLNFGDDIPSALRIAKKKRWNSIEERRIHQESELHSYLSRLIAAERERELEECQRNHEGDEDDSHVRAQQACIEAKHDKYMADMDELFSQVDEKRKKRDIPDYLCGKISFELMREPCITPSGITYDRKDIEEHLQRVGHFDPVTRSPLTQEQLIPNLAMKEVIDAFISENGWVEDYGSGSPAAKRVKLD

SEQ ID NO: 413 - protein, 316 aa, synthetic construct
  source 1..316: note = VL12.3-(GS)6-CHIP-NLS peptide
MGSQPVLTQSPSVSAAPRQRVTISVSGSNSNIGSNTVNWIQQLPGRAPELLMYDDDLLAPGVSDRFSGSRSGTSASLTISGLQSEDEADYYAATWDDSLNGWVFGGGTKVTVLSGGSGSGSGSGSGSRLNFGDDIPSALRIAKKKRWNSIEERRIHQESELHSYLSRLIAAERERELEECQRNHEGDEDDSHVRAQQACIEAKHDKYMADMDELFSQVDEKRKKRDIPDYLCGKISFELMREPCITPSGITYDRKDIEEHLQRVGHFDPVTRSPLTQEQLIPNLAMKEVIDAFISENGWVEDYGSGSPAAKRVKLD

SEQ ID NO: 414 - protein, 315 aa, synthetic construct
  source 1..315: note = VL12.3-(GS)1-CHIP-NLS-HA peptide
MGSQPVLTQSPSVSAAPRQRVTISVSGSNSNIGSNTVNWIQQLPGRAPELLMYDDDLLAPGVSDRFSGSRSGTSASLTISGLQSEDEADYYAATWDDSLNGWVFGGGTKVTVLSGGSRLNFGDDIPSALRIAKKKRWNSIEERRIHQESELHSYLSRLIAAERERELEECQRNHEGDEDDSHVRAQQACIEAKHDKYMADMDELFSQVDEKRKKRDIPDYLCGKISFELMREPCITPSGITYDRKDIEEHLQRVGHFDPVTRSPLTQEQLIPNLAMKEVIDAFISENGWVEDYGSGSPAAKRVKLDYPYDVPDYA

SEQ ID NO: 415 - protein, 317 aa, synthetic construct
  source 1..317: note = VL12.3-(GS)2-CHIP-NLS-HA peptide
MGSQPVLTQSPSVSAAPRQRVTISVSGSNSNIGSNTVNWIQQLPGRAPELLMYDDDLLAPGVSDRFSGSRSGTSASLTISGLQSEDEADYYAATWDDSLNGWVFGGGTKVTVLSGGSGSRLNFGDDIPSALRIAKKKRWNSIEERRIHQESELHSYLSRLIAAERERELEECQRNHEGDEDDSHVRAQQACIEAKHDKYMADMDELFSQVDEKRKKRDIPDYLCGKISFELMREPCITPSGITYDRKDIEEHLQRVGHFDPVTRSPLTQEQLIPNLAMKEVIDAFISENGWVEDYGSGSPAAKRVKLDYPYDVPDYA

SEQ ID NO: 416 - protein, 319 aa, synthetic construct
  source 1..319: note = VL12.3-(GS)3-CHIP-NLS-HA peptide
MGSQPVLTQSPSVSAAPRQRVTISVSGSNSNIGSNTVNWIQQLPGRAPELLMYDDDLLAPGVSDRFSGSRSGTSASLTISGLQSEDEADYYAATWDDSLNGWVFGGGTKVTVLSGGSGSGSRLNFGDDIPSALRIAKKKRWNSIEERRIHQESELHSYLSRLIAAERERELEECQRNHEGDEDDSHVRAQQACIEAKHDKYMADMDELFSQVDEKRKKRDIPDYLCGKISFELMREPCITPSGITYDRKDIEEHLQRVGHFDPVTRSPLTQEQLIPNLAMKEVIDAFISENGWVEDYGSGSPAAKRVKLDYPYDVPDYA

SEQ ID NO: 417 - protein, 321 aa, synthetic construct
  source 1..321: note = VL12.3-(GS)4-CHIP-NLS-HA peptide
MGSQPVLTQSPSVSAAPRQRVTISVSGSNSNIGSNTVNWIQQLPGRAPELLMYDDDLLAPGVSDRFSGSRSGTSASLTISGLQSEDEADYYAATWDDSLNGWVFGGGTKVTVLSGGSGSGSGSRLNFGDDIPSALRIAKKKRWNSIEERRIHQESELHSYLSRLIAAERERELEECQRNHEGDEDDSHVRAQQACIEAKHDKYMADMDELFSQVDEKRKKRDIPDYLCGKISFELMREPCITPSGITYDRKDIEEHLQRVGHFDPVTRSPLTQEQLIPNLAMKEVIDAFISENGWVEDYGSGSPAAKRVKLDYPYDVPDYA

SEQ ID NO: 418 - protein, 323 aa, synthetic construct
  source 1..323: note = VL12.3-(GS)5-CHIP-NLS-HA peptide
MGSQPVLTQSPSVSAAPRQRVTISVSGSNSNIGSNTVNWIQQLPGRAPELLMYDDDLLAPGVSDRFSGSRSGTSASLTISGLQSEDEADYYAATWDDSLNGWVFGGGTKVTVLSGGSGSGSGSGSRLNFGDDIPSALRIAKKKRWNSIEERRIHQESELHSYLSRLIAAERERELEECQRNHEGDEDDSHVRAQQACIEAKHDKYMADMDELFSQVDEKRKKRDIPDYLCGKISFELMREPCITPSGITYDRKDIEEHLQRVGHFDPVTRSPLTQEQLIPNLAMKEVIDAFISENGWVEDYGSGSPAAKRVKLDYPYDVPDYA

SEQ ID NO: 419 - protein, 325 aa, synthetic construct
  source 1..325: note = VL12.3-(GS)6-CHIP-NLS-HA peptide
MGSQPVLTQSPSVSAAPRQRVTISVSGSNSNIGSNTVNWIQQLPGRAPELLMYDDDLLAPGVSDRFSGSRSGTSASLTISGLQSEDEADYYAATWDDSLNGWVFGGGTKVTVLSGGSGSGSGSGSGSRLNFGDDIPSALRIAKKKRWNSIEERRIHQESELHSYLSRLIAAERERELEECQRNHEGDEDDSHVRAQQACIEAKHDKYMADMDELFSQVDEKRKKRDIPDYLCGKISFELMREPCITPSGITYDRKDIEEHLQRVGHFDPVTRSPLTQEQLIPNLAMKEVIDAFISENGWVEDYGSGSPAAKRVKLDYPYDVPDYA

SEQ ID NO: 420 - protein, 166 aa, synthetic construct
  source 1..166: note = NLS-DCAF1-(GS)1-VL12.3 peptide
PAAKRVKLDGSGSGSQAPINFTSRLNRRASFPKYGGVDGGCFDRHLIFSRGSGSQPVLTQSPSVSAAPRQRVTISVSGSNSNIGSNTVNWIQQLPGRAPELLMYDDDLLAPGVSDRFSGSRSGTSASLTISGLQSEDEADYYAATWDDSLNGWVFGGGTKVTVLSG

SEQ ID NO: 421 - protein, 168 aa, synthetic construct
  source 1..168: note = NLS-DCAF1-(GS)2-VL12.3 peptide
PAAKRVKLDGSGSGSQAPINFTSRLNRRASFPKYGGVDGGCFDRHLIFSRGSGSGSQPVLTQSPSVSAAPRQRVTISVSGSNSNIGSNTVNWIQQLPGRAPELLMYDDDLLAPGVSDRFSGSRSGTSASLTISGLQSEDEADYYAATWDDSLNGWVFGGGTKVTVLSG

SEQ ID NO: 422 - protein, 170 aa, synthetic construct
  source 1..170: note = NLS-DCAF1-(GS)3-VL12.3 peptide
PAAKRVKLDGSGSGSQAPINFTSRLNRRASFPKYGGVDGGCFDRHLIFSRGSGSGSGSQPVLTQSPSVSAAPRQRVTISVSGSNSNIGSNTVNWIQQLPGRAPELLMYDDDLLAPGVSDRFSGSRSGTSASLTISGLQSEDEADYYAATWDDSLNGWVFGGGTKVTVLSG

SEQ ID NO: 423 - protein, 172 aa, synthetic construct
  source 1..172: note = NLS-DCAF1-(GS)4-VL12.3 peptide
PAAKRVKLDGSGSGSQAPINFTSRLNRRASFPKYGGVDGGCFDRHLIFSRGSGSGSGSGSQPVLTQSPSVSAAPRQRVTISVSGSNSNIGSNTVNWIQQLPGRAPELLMYDDDLLAPGVSDRFSGSRSGTSASLTISGLQSEDEADYYAATWDDSLNGWVFGGGTKVTVLSG

SEQ ID NO: 424 - protein, 174 aa, synthetic construct
  source 1..174: note = NLS-DCAF1-(GS)5-VL12.3 peptide
PAAKRVKLDGSGSGSQAPINFTSRLNRRASFPKYGGVDGGCFDRHLIFSRGSGSGSGSGSGSQPVLTQSPSVSAAPRQRVTISVSGSNSNIGSNTVNWIQQLPGRAPELLMYDDDLLAPGVSDRFSGSRSGTSASLTISGLQSEDEADYYAATWDDSLNGWVFGGGTKVTVLSG

SEQ ID NO: 425 - protein, 176 aa, synthetic construct
  source 1..176: note = NLS-DCAF1-(GS)6-VL12.3 peptide
PAAKRVKLDGSGSGSQAPINFTSRLNRRASFPKYGGVDGGCFDRHLIFSRGSGSGSGSGSGSGSQPVLTQSPSVSAAPRQRVTISVSGSNSNIGSNTVNWIQQLPGRAPELLMYDDDLLAPGVSDRFSGSRSGTSASLTISGLQSEDEADYYAATWDDSLNGWVFGGGTKVTVLSG

SEQ ID NO: 426 - protein, 176 aa, synthetic construct
  source 1..176: note = HA-NLS-DCAF1-(GS)1-VL12.3 peptide
MYPYDVPDYAPAAKRVKLDGSGSGSQAPINFTSRLNRRASFPKYGGVDGGCFDRHLIFSRGSGSQPVLTQSPSVSAAPRQRVTISVSGSNSNIGSNTVNWIQQLPGRAPELLMYDDDLLAPGVSDRFSGSRSGTSASLTISGLQSEDEADYYAATWDDSLNGWVFGGGTKVTVLSG

SEQ ID NO: 427 - protein, 178 aa, synthetic construct
  source 1..178: note = HA-NLS-DCAF1-(GS)2-VL12.3 peptide
MYPYDVPDYAPAAKRVKLDGSGSGSQAPINFTSRLNRRASFPKYGGVDGGCFDRHLIFSRGSGSGSQPVLTQSPSVSAAPRQRVTISVSGSNSNIGSNTVNWIQQLPGRAPELLMYDDDLLAPGVSDRFSGSRSGTSASLTISGLQSEDEADYYAATWDDSLNGWVFGGGTKVTVLSG

SEQ ID NO: 428 - protein, 180 aa, synthetic construct
  source 1..180: note = HA-NLS-DCAF1-(GS)3-VL12.3 peptide
MYPYDVPDYAPAAKRVKLDGSGSGSQAPINFTSRLNRRASFPKYGGVDGGCFDRHLIFSRGSGSGSGSQPVLTQSPSVSAAPRQRVTISVSGSNSNIGSNTVNWIQQLPGRAPELLMYDDDLLAPGVSDRFSGSRSGTSASLTISGLQSEDEADYYAATWDDSLNGWVFGGGTKVTVLSG

SEQ ID NO: 429 - protein, 182 aa, synthetic construct
  source 1..182: note = HA-NLS-DCAF1-(GS)4-VL12.3 peptide
MYPYDVPDYAPAAKRVKLDGSGSGSQAPINFTSRLNRRASFPKYGGVDGGCFDRHLIFSRGSGSGSGSGSQPVLTQSPSVSAAPRQRVTISVSGSNSNIGSNTVNWIQQLPGRAPELLMYDDDLLAPGVSDRFSGSRSGTSASLTISGLQSEDEADYYAATWDDSLNGWVFGGGTKVTVLSG

SEQ ID NO: 430 - protein, 184 aa, synthetic construct
  source 1..184: note = HA-NLS-DCAF1-(GS)5-VL12.3 peptide
MYPYDVPDYAPAAKRVKLDGSGSGSQAPINFTSRLNRRASFPKYGGVDGGCFDRHLIFSRGSGSGSGSGSGSQPVLTQSPSVSAAPRQRVTISVSGSNSNIGSNTVNWIQQLPGRAPELLMYDDDLLAPGVSDRFSGSRSGTSASLTISGLQSEDEADYYAATWDDSLNGWVFGGGTKVTVLSG

SEQ ID NO: 431 - protein, 186 aa, synthetic construct
  source 1..186: note = HA-NLS-DCAF1-(GS)6-VL12.3 peptide
MYPYDVPDYAPAAKRVKLDGSGSGSQAPINFTSRLNRRASFPKYGGVDGGCFDRHLIFSRGSGSGSGSGSGSGSQPVLTQSPSVSAAPRQRVTISVSGSNSNIGSNTVNWIQQLPGRAPELLMYDDDLLAPGVSDRFSGSRSGTSASLTISGLQSEDEADYYAATWDDSLNGWVFGGGTKVTVLSG

SEQ ID NO: 432 - protein, 487 aa, synthetic construct
  source 1..487: note = NLS-VL12.3-(GS)1-E6AP peptide
PAAKRVKLDGSGSGSGSQPVLTQSPSVSAAPRQRVTISVSGSNSNIGSNTVNWIQQLPGRAPELLMYDDDLLAPGVSDRFSGSRSGTSASLTISGLQSEDEADYYAATWDDSLNGWVFGGGTKVTVLSGGSNPYLRLKVRRDHIIDDALVRLEMIAMENPADLKKQLYVEFEGEQGVDEGGVSKEFFQLVVEEIFNPDIGMFTYDESTKLFWFNPSSFETEGQFTLIGIVLGLAIYNNCILDVHFPMVVYRKLMGKKGTFRDLGDSHPVLYQSLKDLLEYEGNVEDDMMITFQISQTDLFGNPMMYDLKENGDKIPITNENRKEFVNLYSDYILNKSVEKQFKAFRRGFHMVTNESPLKYLFRPEEIELLICGSRNLDFQALEETTEYDGGYTRDSVLIREFWEIVHSFTDEQKRLFLQFTTGTDRAPVGGLGKLKMIIAKNGPDTERLPTSHTCFNVLLLPEYSSKEKLKERLLKAITYAKGFGML

SEQ ID NO: 433 - protein, 489 aa, synthetic construct
  source 1..489: note = NLS-VL12.3-(GS)2-E6AP peptide
PAAKRVKLDGSGSGSGSQPVLTQSPSVSAAPRQRVTISVSGSNSNIGSNTVNWIQQLPGRAPELLMYDDDLLAPGVSDRFSGSRSGTSASLTISGLQSEDEADYYAATWDDSLNGWVFGGGTKVTVLSGGSGSNPYLRLKVRRDHIIDDALVRLEMIAMENPADLKKQLYVEFEGEQGVDEGGVSKEFFQLVVEEIFNPDIGMFTYDESTKLFWFNPSSFETEGQFTLIGIVLGLAIYNNCILDVHFPMVVYRKLMGKKGTFRDLGDSHPVLYQSLKDLLEYEGNVEDDMMITFQISQTDLFGNPMMYDLKENGDKIPITNENRKEFVNLYSDYILNKSVEKQFKAFRRGFHMVTNESPLKYLFRPEEIELLICGSRNLDFQALEETTEYDGGYTRDSVLIREFWEIVHSFTDEQKRLFLQFTTGTDRAPVGGLGKLKMIIAKNGPDTERLPTSHTCFNVLLLPEYSSKEKLKERLLKAITYAKGFGML

SEQ ID NO: 434 - protein, 491 aa, synthetic construct
  source 1..491: note = NLS-VL12.3-(GS)3-E6AP peptide
PAAKRVKLDGSGSGSGSQPVLTQSPSVSAAPRQRVTISVSGSNSNIGSNTVNWIQQLPGRAPELLMYDDDLLAPGVSDRFSGSRSGTSASLTISGLQSEDEADYYAATWDDSLNGWVFGGGTKVTVLSGGSGSGSNPYLRLKVRRDHIIDDALVRLEMIAMENPADLKKQLYVEFEGEQGVDEGGVSKEFFQLVVEEIFNPDIGMFTYDESTKLFWFNPSSFETEGQFTLIGIVLGLAIYNNCILDVHFPMVVYRKLMGKKGTFRDLGDSHPVLYQSLKDLLEYEGNVEDDMMITFQISQTDLFGNPMMYDLKENGDKIPITNENRKEFVNLYSDYILNKSVEKQFKAFRRGFHMVTNESPLKYLFRPEEIELLICGSRNLDFQALEETTEYDGGYTRDSVLIREFWEIVHSFTDEQKRLFLQFTTGTDRAPVGGLGKLKMIIAKNGPDTERLPTSHTCFNVLLLPEYSSKEKLKERLLKAITYAKGFGML

SEQ ID NO: 435 - protein, 493 aa, synthetic construct
  source 1..493: note = NLS-VL12.3-(GS)4-E6AP peptide
PAAKRVKLDGSGSGSGSQPVLTQSPSVSAAPRQRVTISVSGSNSNIGSNTVNWIQQLPGRAPELLMYDDDLLAPGVSDRFSGSRSGTSASLTISGLQSEDEADYYAATWDDSLNGWVFGGGTKVTVLSGGSGSGSGSNPYLRLKVRRDHIIDDALVRLEMIAMENPADLKKQLYVEFEGEQGVDEGGVSKEFFQLVVEEIFNPDIGMFTYDESTKLFWFNPSSFETEGQFTLIGIVLGLAIYNNCILDVHFPMVVYRKLMGKKGTFRDLGDSHPVLYQSLKDLLEYEGNVEDDMMITFQISQTDLFGNPMMYDLKENGDKIPITNENRKEFVNLYSDYILNKSVEKQFKAFRRGFHMVTNESPLKYLFRPEEIELLICGSRNLDFQALEETTEYDGGYTRDSVLIREFWEIVHSFTDEQKRLFLQFTTGTDRAPVGGLGKLKMIIAKNGPDTERLPTSHTCFNVLLLPEYSSKEKLKERLLKAITYAKGFGML

SEQ ID NO: 436 - protein, 495 aa, synthetic construct
  source 1..495: note = NLS-VL12.3-(GS)5-E6AP peptide
PAAKRVKLDGSGSGSGSQPVLTQSPSVSAAPRQRVTISVSGSNSNIGSNTVNWIQQLPGRAPELLMYDDDLLAPGVSDRFSGSRSGTSASLTISGLQSEDEADYYAATWDDSLNGWVFGGGTKVTVLSGGSGSGSGSGSNPYLRLKVRRDHIIDDALVRLEMIAMENPADLKKQLYVEFEGEQGVDEGGVSKEFFQLVVEEIFNPDIGMFTYDESTKLFWFNPSSFETEGQFTLIGIVLGLAIYNNCILDVHFPMVVYRKLMGKKGTFRDLGDSHPVLYQSLKDLLEYEGNVEDDMMITFQISQTDLFGNPMMYDLKENGDKIPITNENRKEFVNLYSDYILNKSVEKQFKAFRRGFHMVTNESPLKYLFRPEEIELLICGSRNLDFQALEETTEYDGGYTRDSVLIREFWEIVHSFTDEQKRLFLQFTTGTDRAPVGGLGKLKMIIAKNGPDTERLPTSHTCFNVLLLPEYSSKEKLKERLLKAITYAKGFGML

SEQ ID NO: 437 - protein, 497 aa, synthetic construct
  source 1..497: note = NLS-VL12.3-(GS)6-E6AP peptide
PAAKRVKLDGSGSGSGSQPVLTQSPSVSAAPRQRVTISVSGSNSNIGSNTVNWIQQLPGRAPELLMYDDDLLAPGVSDRFSGSRSGTSASLTISGLQSEDEADYYAATWDDSLNGWVFGGGTKVTVLSGGSGSGSGSGSGSNPYLRLKVRRDHIIDDALVRLEMIAMENPADLKKQLYVEFEGEQGVDEGGVSKEFFQLVVEEIFNPDIGMFTYDESTKLFWFNPSSFETEGQFTLIGIVLGLAIYNNCILDVHFPMVVYRKLMGKKGTFRDLGDSHPVLYQSLKDLLEYEGNVEDDMMITFQISQTDLFGNPMMYDLKENGDKIPITNENRKEFVNLYSDYILNKSVEKQFKAFRRGFHMVTNESPLKYLFRPEEIELLICGSRNLDFQALEETTEYDGGYTRDSVLIREFWEIVHSFTDEQKRLFLQFTTGTDRAPVGGLGKLKMIIAKNGPDTERLPTSHTCFNVLLLPEYSSKEKLKERLLKAITYAKGFGML

SEQ ID NO: 438 - protein, 497 aa, synthetic construct
  source 1..497: note = HA-NLS-VL12.3-(GS)1-E6AP peptide
MYPYDVPDYAPAAKRVKLDGSGSGSGSQPVLTQSPSVSAAPRQRVTISVSGSNSNIGSNTVNWIQQLPGRAPELLMYDDDLLAPGVSDRFSGSRSGTSASLTISGLQSEDEADYYAATWDDSLNGWVFGGGTKVTVLSGGSNPYLRLKVRRDHIIDDALVRLEMIAMENPADLKKQLYVEFEGEQGVDEGGVSKEFFQLVVEEIFNPDIGMFTYDESTKLFWFNPSSFETEGQFTLIGIVLGLAIYNNCILDVHFPMVVYRKLMGKKGTFRDLGDSHPVLYQSLKDLLEYEGNVEDDMMITFQISQTDLFGNPMMYDLKENGDKIPITNENRKEFVNLYSDYILNKSVEKQFKAFRRGFHMVTNESPLKYLFRPEEIELLICGSRNLDFQALEETTEYDGGYTRDSVLIREFWEIVHSFTDEQKRLFLQFTTGTDRAPVGGLGKLKMIIAKNGPDTERLPTSHTCFNVLLLPEYSSKEKLKERLLKAITYAKGFGML

SEQ ID NO: 439 - protein, 499 aa, synthetic construct
  source 1..499: note = HA-NLS-VL12.3-(GS)2-E6AP peptide
MYPYDVPDYAPAAKRVKLDGSGSGSGSQPVLTQSPSVSAAPRQRVTISVSGSNSNIGSNTVNWIQQLPGRAPELLMYDDDLLAPGVSDRFSGSRSGTSASLTISGLQSEDEADYYAATWDDSLNGWVFGGGTKVTVLSGGSGSNPYLRLKVRRDHIIDDALVRLEMIAMENPADLKKQLYVEFEGEQGVDEGGVSKEFFQLVVEEIFNPDIGMFTYDESTKLFWFNPSSFETEGQFTLIGIVLGLAIYNNCILDVHFPMVVYRKLMGKKGTFRDLGDSHPVLYQSLKDLLEYEGNVEDDMMITFQISQTDLFGNPMMYDLKENGDKIPITNENRKEFVNLYSDYILNKSVEKQFKAFRRGFHMVTNESPLKYLFRPEEIELLICGSRNLDFQALEETTEYDGGYTRDSVLIREFWEIVHSFTDEQKRLFLQFTTGTDRAPVGGLGKLKMIIAKNGPDTERLPTSHTCFNVLLLPEYSSKEKLKERLLKAITYAKGFGML

SEQ ID NO: 440 - protein, 501 aa, synthetic construct
  source 1..501: note = HA-NLS-VL12.3-(GS)3-E6AP peptide
MYPYDVPDYAPAAKRVKLDGSGSGSGSQPVLTQSPSVSAAPRQRVTISVSGSNSNIGSNTVNWIQQLPGRAPELLMYDDDLLAPGVSDRFSGSRSGTSASLTISGLQSEDEADYYAATWDDSLNGWVFGGGTKVTVLSGGSGSGSNPYLRLKVRRDHIIDDALVRLEMIAMENPADLKKQLYVEFEGEQGVDEGGVSKEFFQLVVEEIFNPDIGMFTYDESTKLFWFNPSSFETEGQFTLIGIVLGLAIYNNCILDVHFPMVVYRKLMGKKGTFRDLGDSHPVLYQSLKDLLEYEGNVEDDMMITFQISQTDLFGNPMMYDLKENGDKIPITNENRKEFVNLYSDYILNKSVEKQFKAFRRGFHMVTNESPLKYLFRPEEIELLICGSRNLDFQALEETTEYDGGYTRDSVLIREFWEIVHSFTDEQKRLFLQFTTGTDRAPVGGLGKLKMIIAKNGPDTERLPTSHTCFNVLLLPEYSSKEKLKERLLKAITYAKGFGML

SEQ ID NO: 441 - protein, 503 aa, synthetic construct
  source 1..503: note = HA-NLS-VL12.3-(GS)4-E6AP peptide
MYPYDVPDYAPAAKRVKLDGSGSGSGSQPVLTQSPSVSAAPRQRVTISVSGSNSNIGSNTVNWIQQLPGRAPELLMYDDDLLAPGVSDRFSGSRSGTSASLTISGLQSEDEADYYAATWDDSLNGWVFGGGTKVTVLSGGSGSGSGSNPYLRLKVRRDHIIDDALVRLEMIAMENPADLKKQLYVEFEGEQGVDEGGVSKEFFQLVVEEIFNPDIGMFTYDESTKLFWFNPSSFETEGQFTLIGIVLGLAIYNNCILDVHFPMVVYRKLMGKKGTFRDLGDSHPVLYQSLKDLLEYEGNVEDDMMITFQISQTDLFGNPMMYDLKENGDKIPITNENRKEFVNLYSDYILNKSVEKQFKAFRRGFHMVTNESPLKYLFRPEEIELLICGSRNLDFQALEETTEYDGGYTRDSVLIREFWEIVHSFTDEQKRLFLQFTTGTDRAPVGGLGKLKMIIAKNGPDTERLPTSHTCFNVLLLPEYSSKEKLKERLLKAITYAKGFGML

SEQ ID NO: 442 - protein, 505 aa, synthetic construct
  source 1..505: note = HA-NLS-VL12.3-(GS)5-E6AP peptide
MYPYDVPDYAPAAKRVKLDGSGSGSGSQPVLTQSPSVSAAPRQRVTISVSGSNSNIGSNTVNWIQQLPGRAPELLMYDDDLLAPGVSDRFSGSRSGTSASLTISGLQSEDEADYYAATWDDSLNGWVFGGGTKVTVLSGGSGSGSGSGSNPYLRLKVRRDHIIDDALVRLEMIAMENPADLKKQLYVEFEGEQGVDEGGVSKEFFQLVVEEIFNPDIGMFTYDESTKLFWFNPSSFETEGQFTLIGIVLGLAIYNNCILDVHFPMVVYRKLMGKKGTFRDLGDSHPVLYQSLKDLLEYEGNVEDDMMITFQISQTDLFGNPMMYDLKENGDKIPITNENRKEFVNLYSDYILNKSVEKQFKAFRRGFHMVTNESPLKYLFRPEEIELLICGSRNLDFQALEETTEYDGGYTRDSVLIREFWEIVHSFTDEQKRLFLQFTTGTDRAPVGGLGKLKMIIAKNGPDTERLPTSHTCFNVLLLPEYSSKEKLKERLLKAITYAKGFGML

SEQ ID NO: 443 - protein, 507 aa, synthetic construct
  source 1..507: note = HA-NLS-VL12.3-(GS)6-E6AP peptide
MYPYDVPDYAPAAKRVKLDGSGSGSGSQPVLTQSPSVSAAPRQRVTISVSGSNSNIGSNTVNWIQQLPGRAPELLMYDDDLLAPGVSDRFSGSRSGTSASLTISGLQSEDEADYYAATWDDSLNGWVFGGGTKVTVLSGGSGSGSGSGSGSNPYLRLKVRRDHIIDDALVRLEMIAMENPADLKKQLYVEFEGEQGVDEGGVSKEFFQLVVEEIFNPDIGMFTYDESTKLFWFNPSSFETEGQFTLIGIVLGLAIYNNCILDVHFPMVVYRKLMGKKGTFRDLGDSHPVLYQSLKDLLEYEGNVEDDMMITFQISQTDLFGNPMMYDLKENGDKIPITNENRKEFVNLYSDYILNKSVEKQFKAFRRGFHMVTNESPLKYLFRPEEIELLICGSRNLDFQALEETTEYDGGYTRDSVLIREFWEIVHSFTDEQKRLFLQFTTGTDRAPVGGLGKLKMIIAKNGPDTERLPTSHTCFNVLLLPEYSSKEKLKERLLKAITYAKGFGML

SEQ ID NO: 444 - protein, 483 aa, synthetic construct
  source 1..483: note = FBXW7a-(GS)1-VL12.3 peptide
NQELLSVGSKRRRTGGSLRGNPSSSQVDEEQMNRVVEEEQQQQLRQQEEEHTARNGEVVGVEPRPGGQNDSQQGQLEENNNRFISVDEDSSGNQEEQEEDEEHAGEQDEEDEEEEEMDQESDDFDQSDDSSREDEHTHTNSVTNSSSIVDLPVHQLSSPFYTKTTKMKRKLDHGSEVRSFSLGKKPCKVSEYTSTTGLVPCSATPTTFGDLRAANGQGQQRRRITSVQPPTGLQEWLKMFQSWSGPEKLLALDELIDSCEPTQVKHMMQVIEPQFQRDFISLLPKELALYVLSFLEPKDLLQAAQTCRYWRILAEDNLLWREKCKEEGIDEPLHIKRRKVIKPGFIHSPWKSAYIRQHRIDTNSRRGGSGSQPVLTQSPSVSAAPRQRVTISVSGSNSNIGSNTVNWIQQLPGRAPELLMYDDDLLAPGVSDRFSGSRSGTSASLTISGLQSEDEADYYAATWDDSLNGWVFGGGTKVTVLSG

SEQ ID NO: 445 - protein, 485 aa, synthetic construct
  source 1..485: note = FBXW7a-(GS)2-VL12.3 peptide
NQELLSVGSKRRRTGGSLRGNPSSSQVDEEQMNRVVEEEQQQQLRQQEEEHTARNGEVVGVEPRPGGQNDSQQGQLEENNNRFISVDEDSSGNQEEQEEDEEHAGEQDEEDEEEEEMDQESDDFDQSDDSSREDEHTHTNSVTNSSSIVDLPVHQLSSPFYTKTTKMKRKLDHGSEVRSFSLGKKPCKVSEYTSTTGLVPCSATPTTFGDLRAANGQGQQRRRITSVQPPTGLQEWLKMFQSWSGPEKLLALDELIDSCEPTQVKHMMQVIEPQFQRDFISLLPKELALYVLSFLEPKDLLQAAQTCRYWRILAEDNLLWREKCKEEGIDEPLHIKRRKVIKPGFIHSPWKSAYIRQHRIDTNSRRGGSGSGSQPVLTQSPSVSAAPRQRVTISVSGSNSNIGSNTVNWIQQLPGRAPELLMYDDDLLAPGVSDRFSGSRSGTSASLTISGLQSEDEADYYAATWDDSLNGWVFGGGTKVTVLSG

SEQ ID NO: 446 - protein, 487 aa, synthetic construct
  source 1..487: note = FBXW7a-(GS)3-VL12.3 peptide
NQELLSVGSKRRRTGGSLRGNPSSSQVDEEQMNRVVEEEQQQQLRQQEEEHTARNGEVVGVEPRPGGQNDSQQGQLEENNNRFISVDEDSSGNQEEQEEDEEHAGEQDEEDEEEEEMDQESDDFDQSDDSSREDEHTHTNSVTNSSSIVDLPVHQLSSPFYTKTTKMKRKLDHGSEVRSFSLGKKPCKVSEYTSTTGLVPCSATPTTFGDLRAANGQGQQRRRITSVQPPTGLQEWLKMFQSWSGPEKLLALDELIDSCEPTQVKHMMQVIEPQFQRDFISLLPKELALYVLSFLEPKDLLQAAQTCRYWRILAEDNLLWREKCKEEGIDEPLHIKRRKVIKPGFIHSPWKSAYIRQHRIDTNSRRGGSGSGSGSQPVLTQSPSVSAAPRQRVTISVSGSNSNIGSNTVNWIQQLPGRAPELLMYDDDLLAPGVSDRFSGSRSGTSASLTISGLQSEDEADYYAATWDDSLNGWVFGGGTKVTVLSG

SEQ ID NO: 447 - protein, 489 aa, synthetic construct
  source 1..489: note = FBXW7a-(GS)4-VL12.3 peptide
NQELLSVGSKRRRTGGSLRGNPSSSQVDEEQMNRVVEEEQQQQLRQQEEEHTARNGEVVGVEPRPGGQNDSQQGQLEENNNRFISVDEDSSGNQEEQEEDEEHAGEQDEEDEEEEEMDQESDDFDQSDDSSREDEHTHTNSVTNSSSIVDLPVHQLSSPFYTKTTKMKRKLDHGSEVRSFSLGKKPCKVSEYTSTTGLVPCSATPTTFGDLRAANGQGQQRRRITSVQPPTGLQEWLKMFQSWSGPEKLLALDELIDSCEPTQVKHMMQVIEPQFQRDFISLLPKELALYVLSFLEPKDLLQAAQTCRYWRILAEDNLLWREKCKEEGIDEPLHIKRRKVIKPGFIHSPWKSAYIRQHRIDTNSRRGGSGSGSGSGSQPVLTQSPSVSAAPRQRVTISVSGSNSNIGSNTVNWIQQLPGRAPELLMYDDDLLAPGVSDRFSGSRSGTSASLTISGLQSEDEADYYAATWDDSLNGWVFGGGTKVTVLSG

SEQ ID NO: 448 - protein, 491 aa, synthetic construct
  source 1..491: note = FBXW7a-(GS)5-VL12.3 peptide
NQELLSVGSKRRRTGGSLRGNPSSSQVDEEQMNRVVEEEQQQQLRQQEEEHTARNGEVVGVEPRPGGQNDSQQGQLEENNNRFISVDEDSSGNQEEQEEDEEHAGEQDEEDEEEEEMDQESDDFDQSDDSSREDEHTHTNSVTNSSSIVDLPVHQLSSPFYTKTTKMKRKLDHGSEVRSFSLGKKPCKVSEYTSTTGLVPCSATPTTFGDLRAANGQGQQRRRITSVQPPTGLQEWLKMFQSWSGPEKLLALDELIDSCEPTQVKHMMQVIEPQFQRDFISLLPKELALYVLSFLEPKDLLQAAQTCRYWRILAEDNLLWREKCKEEGIDEPLHIKRRKVIKPGFIHSPWKSAYIRQHRIDTNSRRGGSGSGSGSGSGSQPVLTQSPSVSAAPRQRVTISVSGSNSNIGSNTVNWIQQLPGRAPELLMYDDDLLAPGVSDRFSGSRSGTSASLTISGLQSEDEADYYAATWDDSLNGWVFGGGTKVTVLSG

SEQ ID NO: 449 - protein, 493 aa, synthetic construct
  source 1..493: note = FBXW7a-(GS)6-VL12.3 peptide
NQELLSVGSKRRRTGGSLRGNPSSSQVDEEQMNRVVEEEQQQQLRQQEEEHTARNGEVVGVEPRPGGQNDSQQGQLEENNNRFISVDEDSSGNQEEQEEDEEHAGEQDEEDEEEEEMDQESDDFDQSDDSSREDEHTHTNSVTNSSSIVDLPVHQLSSPFYTKTTKMKRKLDHGSEVRSFSLGKKPCKVSEYTSTTGLVPCSATPTTFGDLRAANGQGQQRRRITSVQPPTGLQEWLKMFQSWSGPEKLLALDELIDSCEPTQVKHMMQVIEPQFQRDFISLLPKELALYVLSFLEPKDLLQAAQTCRYWRILAEDNLLWREKCKEEGIDEPLHIKRRKVIKPGFIHSPWKSAYIRQHRIDTNSRRGGSGSGSGSGSGSGSQPVLTQSPSVSAAPRQRVTISVSGSNSNIGSNTVNWIQQLPGRAPELLMYDDDLLAPGVSDRFSGSRSGTSASLTISGLQSEDEADYYAATWDDSLNGWVFGGGTKVTVLSG

SEQ ID NO: 450 - protein, 493 aa, synthetic construct
  source 1..493: note = HA-FBXW7a-(GS)1-VL12.3 peptide
MYPYDVPDYANQELLSVGSKRRRTGGSLRGNPSSSQVDEEQMNRVVEEEQQQQLRQQEEEHTARNGEVVGVEPRPGGQNDSQQGQLEENNNRFISVDEDSSGNQEEQEEDEEHAGEQDEEDEEEEEMDQESDDFDQSDDSSREDEHTHTNSVTNSSSIVDLPVHQLSSPFYTKTTKMKRKLDHGSEVRSFSLGKKPCKVSEYTSTTGLVPCSATPTTFGDLRAANGQGQQRRRITSVQPPTGLQEWLKMFQSWSGPEKLLALDELIDSCEPTQVKHMMQVIEPQFQRDFISLLPKELALYVLSFLEPKDLLQAAQTCRYWRILAEDNLLWREKCKEEGIDEPLHIKRRKVIKPGFIHSPWKSAYIRQHRIDTNSRRGGSGSQPVLTQSPSVSAAPRQRVTISVSGSNSNIGSNTVNWIQQLPGRAPELLMYDDDLLAPGVSDRFSGSRSGTSASLTISGLQSEDEADYYAATWDDSLNGWVFGGGTKVTVLSG

SEQ ID NO: 451 - protein, 495 aa, synthetic construct
  source 1..495: note = HA-FBXW7a-(GS)2-VL12.3 peptide
MYPYDVPDYANQELLSVGSKRRRTGGSLRGNPSSSQVDEEQMNRVVEEEQQQQLRQQEEEHTARNGEVVGVEPRPGGQNDSQQGQLEENNNRFISVDEDSSGNQEEQEEDEEHAGEQDEEDEEEEEMDQESDDFDQSDDSSREDEHTHTNSVTNSSSIVDLPVHQLSSPFYTKTTKMKRKLDHGSEVRSFSLGKKPCKVSEYTSTTGLVPCSATPTTFGDLRAANGQGQQRRRITSVQPPTGLQEWLKMFQSWSGPEKLLALDELIDSCEPTQVKHMMQVIEPQFQRDFISLLPKELALYVLSFLEPKDLLQAAQTCRYWRILAEDNLLWREKCKEEGIDEPLHIKRRKVIKPGFIHSPWKSAYIRQHRIDTNSRRGGSGSGSQPVLTQSPSVSAAPRQRVTISVSGSNSNIGSNTVNWIQQLPGRAPELLMYDDDLLAPGVSDRFSGSRSGTSASLTISGLQSEDEADYYAATWDDSLNGWVFGGGTKVTVLSG

SEQ ID NO: 452 - protein, 497 aa, synthetic construct
  source 1..497: note = HA-FBXW7a-(GS)3-VL12.3 peptide
MYPYDVPDYANQELLSVGSKRRRTGGSLRGNPSSSQVDEEQMNRVVEEEQQQQLRQQEEEHTARNGEVVGVEPRPGGQNDSQQGQLEENNNRFISVDEDSSGNQEEQEEDEEHAGEQDEEDEEEEEMDQESDDFDQSDDSSREDEHTHTNSVTNSSSIVDLPVHQLSSPFYTKTTKMKRKLDHGSEVRSFSLGKKPCKVSEYTSTTGLVPCSATPTTFGDLRAANGQGQQRRRITSVQPPTGLQEWLKMFQSWSGPEKLLALDELIDSCEPTQVKHMMQVIEPQFQRDFISLLPKELALYVLSFLEPKDLLQAAQTCRYWRILAEDNLLWREKCKEEGIDEPLHIKRRKVIKPGFIHSPWKSAYIRQHRIDTNSRRGGSGSGSGSQPVLTQSPSVSAAPRQRVTISVSGSNSNIGSNTVNWIQQLPGRAPELLMYDDDLLAPGVSDRFSGSRSGTSASLTISGLQSEDEADYYAATWDDSLNGWVFGGGTKVTVLSG

SEQ ID NO: 453 - protein, 499 aa, synthetic construct
  source 1..499: note = HA-FBXW7a-(GS)4-VL12.3 peptide
MYPYDVPDYANQELLSVGSKRRRTGGSLRGNPSSSQVDEEQMNRVVEEEQQQQLRQQEEEHTARNGEVVGVEPRPGGQNDSQQGQLEENNNRFISVDEDSSGNQEEQEEDEEHAGEQDEEDEEEEEMDQESDDFDQSDDSSREDEHTHTNSVTNSSSIVDLPVHQLSSPFYTKTTKMKRKLDHGSEVRSFSLGKKPCKVSEYTSTTGLVPCSATPTTFGDLRAANGQGQQRRRITSVQPPTGLQEWLKMFQSWSGPEKLLALDELIDSCEPTQVKHMMQVIEPQFQRDFISLLPKELALYVLSFLEPKDLLQAAQTCRYWRILAEDNLLWREKCKEEGIDEPLHIKRRKVIKPGFIHSPWKSAYIRQHRIDTNSRRGGSGSGSGSGSQPVLTQSPSVSAAPRQRVTISVSGSNSNIGSNTVNWIQQLPGRAPELLMYDDDLLAPGVSDRFSGSRSGTSASLTISGLQSEDEADYYAATWDDSLNGWVFGGGTKVTVLSG

SEQ ID NO: 454 - protein, 501 aa, synthetic construct
  source 1..501: note = HA-FBXW7a-(GS)5-VL12.3 peptide
MYPYDVPDYANQELLSVGSKRRRTGGSLRGNPSSSQVDEEQMNRVVEEEQQQQLRQQEEEHTARNGEVVGVEPRPGGQNDSQQGQLEENNNRFISVDEDSSGNQEEQEEDEEHAGEQDEEDEEEEEMDQESDDFDQSDDSSREDEHTHTNSVTNSSSIVDLPVHQLSSPFYTKTTKMKRKLDHGSEVRSFSLGKKPCKVSEYTSTTGLVPCSATPTTFGDLRAANGQGQQRRRITSVQPPTGLQEWLKMFQSWSGPEKLLALDELIDSCEPTQVKHMMQVIEPQFQRDFISLLPKELALYVLSFLEPKDLLQAAQTCRYWRILAEDNLLWREKCKEEGIDEPLHIKRRKVIKPGFIHSPWKSAYIRQHRIDTNSRRGGSGSGSGSGSGSQPVLTQSPSVSAAPRQRVTISVSGSNSNIGSNTVNWIQQLPGRAPELLMYDDDLLAPGVSDRFSGSRSGTSASLTISGLQSEDEADYYAATWDDSLNGWVFGGGTKVTVLSG

SEQ ID NO: 455 - protein, 503 aa, synthetic construct
  source 1..503: note = HA-FBXW7a-(GS)6-VL12.3 peptide
MYPYDVPDYANQELLSVGSKRRRTGGSLRGNPSSSQVDEEQMNRVVEEEQQQQLRQQEEEHTARNGEVVGVEPRPGGQNDSQQGQLEENNNRFISVDEDSSGNQEEQEEDEEHAGEQDEEDEEEEEMDQESDDFDQSDDSSREDEHTHTNSVTNSSSIVDLPVHQLSSPFYTKTTKMKRKLDHGSEVRSFSLGKKPCKVSEYTSTTGLVPCSATPTTFGDLRAANGQGQQRRRITSVQPPTGLQEWLKMFQSWSGPEKLLALDELIDSCEPTQVKHMMQVIEPQFQRDFISLLPKELALYVLSFLEPKDLLQAAQTCRYWRILAEDNLLWREKCKEEGIDEPLHIKRRKVIKPGFIHSPWKSAYIRQHRIDTNSRRGGSGSGSGSGSGSGSQPVLTQSPSVSAAPRQRVTISVSGSNSNIGSNTVNWIQQLPGRAPELLMYDDDLLAPGVSDRFSGSRSGTSASLTISGLQSEDEADYYAATWDDSLNGWVFGGGTKVTVLSG

SEQ ID NO: 456 - protein, 452 aa, synthetic construct
  source 1..452: note = NLS-Keap1-(GS)1-VL12.3 peptide
PAAKRVKLDGSGSGSQPDPRPSGAGACCRFLPLQSQCPEGAGDAVMYASTECKAEVTPSQHGNRTFSYTLEDHTKQAFGIMNELRLSQQLCDVTLQVKYQDAPAAQFMAHKVVLASSSPVFKAMFTNGLREQGMEVVSIEGIHPKVMERLIEFAYTASISMGEKCVLHVMNGAVMYQIDSVVRACSDFLVQQLDPSNAIGIANFAEQIGCVELHQRAREYIYMHFGEVAKQEEFFNLSHCQLVTLISRDDLNVRCESEVFHACINWVKYDCEQRRFYVQALLRAVRCHSLTPNFLQMQLQKCEILQSDSRCKDYLVKIFEELTLHKPTQVMPCRAPGSGSQPVLTQSPSVSAAPRQRVTISVSGSNSNIGSNTVNWIQQLPGRAPELLMYDDDLLAPGVSDRFSGSRSGTSASLTISGLQSEDEADYYAATWDDSLNGWVFGGGTKVTVLSG

SEQ ID NO: 457 - protein, 454 aa, synthetic construct
  source 1..454: note = NLS-Keap1-(GS)2-VL12.3 peptide
PAAKRVKLDGSGSGSQPDPRPSGAGACCRFLPLQSQCPEGAGDAVMYASTECKAEVTPSQHGNRTFSYTLEDHTKQAFGIMNELRLSQQLCDVTLQVKYQDAPAAQFMAHKVVLASSSPVFKAMFTNGLREQGMEVVSIEGIHPKVMERLIEFAYTASISMGEKCVLHVMNGAVMYQIDSVVRACSDFLVQQLDPSNAIGIANFAEQIGCVELHQRAREYIYMHFGEVAKQEEFFNLSHCQLVTLISRDDLNVRCESEVFHACINWVKYDCEQRRFYVQALLRAVRCHSLTPNFLQMQLQKCEILQSDSRCKDYLVKIFEELTLHKPTQVMPCRAPGSGSGSQPVLTQSPSVSAAPRQRVTISVSGSNSNIGSNTVNWIQQLPGRAPELLMYDDDLLAPGVSDRFSGSRSGTSASLTISGLQSEDEADYYAATWDDSLNGWVFGGGTKVTVLSG

SEQ ID NO: 458 - protein, 456 aa, synthetic construct
  source 1..456: note = NLS-Keap1-(GS)3-VL12.3 peptide
PAAKRVKLDGSGSGSQPDPRPSGAGACCRFLPLQSQCPEGAGDAVMYASTECKAEVTPSQHGNRTFSYTLEDHTKQAFGIMNELRLSQQLCDVTLQVKYQDAPAAQFMAHKVVLASSSPVFKAMFTNGLREQGMEVVSIEGIHPKVMERLIEFAYTASISMGEKCVLHVMNGAVMYQIDSVVRACSDFLVQQLDPSNAIGIANFAEQIGCVELHQRAREYIYMHFGEVAKQEEFFNLSHCQLVTLISRDDLNVRCESEVFHACINWVKYDCEQRRFYVQALLRAVRCHSLTPNFLQMQLQKCEILQSDSRCKDYLVKIFEELTLHKPTQVMPCRAPGSGSGSGSQPVLTQSPSVSAAPRQRVTISVSGSNSNIGSNTVNWIQQLPGRAPELLMYDDDLLAPGVSDRFSGSRSGTSASLTISGLQSEDEADYYAATWDDSLNGWVFGGGTKVTVLSG

SEQ ID NO: 459 - protein, 458 aa, synthetic construct
  source 1..458: note = NLS-Keap1-(GS)4-VL12.3 peptide
PAAKRVKLDGSGSGSQPDPRPSGAGACCRFLPLQSQCPEGAGDAVMYASTECKAEVTPSQHGNRTFSYTLEDHTKQAFGIMNELRLSQQLCDVTLQVKYQDAPAAQFMAHKVVLASSSPVFKAMFTNGLREQGMEVVSIEGIHPKVMERLIEFAYTASISMGEKCVLHVMNGAVMYQIDSVVRACSDFLVQQLDPSNAIGIANFAEQIGCVELHQRAREYIYMHFGEVAKQEEFFNLSHCQLVTLISRDDLNVRCESEVFHACINWVKYDCEQRRFYVQALLRAVRCHSLTPNFLQMQLQKCEILQSDSRCKDYLVKIFEELTLHKPTQVMPCRAPGSGSGSGSGSQPVLTQSPSVSAAPRQRVTISVSGSNSNIGSNTVNWIQQLPGRAPELLMYDDDLLAPGVSDRFSGSRSGTSASLTISGLQSEDEADYYAATWDDSLNGWVFGGGTKVTVLSG

SEQ ID NO: 460 - protein, 460 aa, synthetic construct
  source 1..460: note = NLS-Keap1-(GS)5-VL12.3 peptide
PAAKRVKLDGSGSGSQPDPRPSGAGACCRFLPLQSQCPEGAGDAVMYASTECKAEVTPSQHGNRTFSYTLEDHTKQAFGIMNELRLSQQLCDVTLQVKYQDAPAAQFMAHKVVLASSSPVFKAMFTNGLREQGMEVVSIEGIHPKVMERLIEFAYTASISMGEKCVLHVMNGAVMYQIDSVVRACSDFLVQQLDPSNAIGIANFAEQIGCVELHQRAREYIYMHFGEVAKQEEFFNLSHCQLVTLISRDDLNVRCESEVFHACINWVKYDCEQRRFYVQALLRAVRCHSLTPNFLQMQLQKCEILQSDSRCKDYLVKIFEELTLHKPTQVMPCRAPGSGSGSGSGSGSQPVLTQSPSVSAAPRQRVTISVSGSNSNIGSNTVNWIQQLPGRAPELLMYDDDLLAPGVSDRFSGSRSGTSASLTISGLQSEDEADYYAATWDDSLNGWVFGGGTKVTVLSG

SEQ ID NO: 461 - protein, 462 aa, synthetic construct
  source 1..462: note = NLS-Keap1-(GS)6-VL12.3 peptide
PAAKRVKLDGSGSGSQPDPRPSGAGACCRFLPLQSQCPEGAGDAVMYASTECKAEVTPSQHGNRTFSYTLEDHTKQAFGIMNELRLSQQLCDVTLQVKYQDAPAAQFMAHKVVLASSSPVFKAMFTNGLREQGMEVVSIEGIHPKVMERLIEFAYTASISMGEKCVLHVMNGAVMYQIDSVVRACSDFLVQQLDPSNAIGIANFAEQIGCVELHQRAREYIYMHFGEVAKQEEFFNLSHCQLVTLISRDDLNVRCESEVFHACINWVKYDCEQRRFYVQALLRAVRCHSLTPNFLQMQLQKCEILQSDSRCKDYLVKIFEELTLHKPTQVMPCRAPGSGSGSGSGSGSGSQPVLTQSPSVSAAPRQRVTISVSGSNSNIGSNTVNWIQQLPGRAPELLMYDDDLLAPGVSDRFSGSRSGTSASLTISGLQSEDEADYYAATWDDSLNGWVFGGGTKVTVLSG

SEQ ID NO: 462 - protein, 462 aa, synthetic construct
  source 1..462: note = HA-NLS-Keap1-(GS)1-VL12.3 peptide
MYPYDVPDYAPAAKRVKLDGSGSGSQPDPRPSGAGACCRFLPLQSQCPEGAGDAVMYASTECKAEVTPSQHGNRTFSYTLEDHTKQAFGIMNELRLSQQLCDVTLQVKYQDAPAAQFMAHKVVLASSSPVFKAMFTNGLREQGMEVVSIEGIHPKVMERLIEFAYTASISMGEKCVLHVMNGAVMYQIDSVVRACSDFLVQQLDPSNAIGIANFAEQIGCVELHQRAREYIYMHFGEVAKQEEFFNLSHCQLVTLISRDDLNVRCESEVFHACINWVKYDCEQRRFYVQALLRAVRCHSLTPNFLQMQLQKCEILQSDSRCKDYLVKIFEELTLHKPTQVMPCRAPGSGSQPVLTQSPSVSAAPRQRVTISVSGSNSNIGSNTVNWIQQLPGRAPELLMYDDDLLAPGVSDRFSGSRSGTSASLTISGLQSEDEADYYAATWDDSLNGWVFGGGTKVTVLSG

SEQ ID NO: 463 - protein, 464 aa, synthetic construct
  source 1..464: note = HA-NLS-Keap1-(GS)2-VL12.3 peptide
MYPYDVPDYAPAAKRVKLDGSGSGSQPDPRPSGAGACCRFLPLQSQCPEGAGDAVMYASTECKAEVTPSQHGNRTFSYTLEDHTKQAFGIMNELRLSQQLCDVTLQVKYQDAPAAQFMAHKVVLASSSPVFKAMFTNGLREQGMEVVSIEGIHPKVMERLIEFAYTASISMGEKCVLHVMNGAVMYQIDSVVRACSDFLVQQLDPSNAIGIANFAEQIGCVELHQRAREYIYMHFGEVAKQEEFFNLSHCQLVTLISRDDLNVRCESEVFHACINWVKYDCEQRRFYVQALLRAVRCHSLTPNFLQMQLQKCEILQSDSRCKDYLVKIFEELTLHKPTQVMPCRAPGSGSGSQPVLTQSPSVSAAPRQRVTISVSGSNSNIGSNTVNWIQQLPGRAPELLMYDDDLLAPGVSDRFSGSRSGTSASLTISGLQSEDEADYYAATWDDSLNGWVFGGGTKVTVLSG

SEQ ID NO: 464 - protein, 466 aa, synthetic construct
  source 1..466: note = HA-NLS-Keap1-(GS)3-VL12.3 peptide
MYPYDVPDYAPAAKRVKLDGSGSGSQPDPRPSGAGACCRFLPLQSQCPEGAGDAVMYASTECKAEVTPSQHGNRTFSYTLEDHTKQAFGIMNELRLSQQLCDVTLQVKYQDAPAAQFMAHKVVLASSSPVFKAMFTNGLREQGMEVVSIEGIHPKVMERLIEFAYTASISMGEKCVLHVMNGAVMYQIDSVVRACSDFLVQQLDPSNAIGIANFAEQIGCVELHQRAREYIYMHFGEVAKQEEFFNLSHCQLVTLISRDDLNVRCESEVFHACINWVKYDCEQRRFYVQALLRAVRCHSLTPNFLQMQLQKCEILQSDSRCKDYLVKIFEELTLHKPTQVMPCRAPGSGSGSGSQPVLTQSPSVSAAPRQRVTISVSGSNSNIGSNTVNWIQQLPGRAPELLMYDDDLLAPGVSDRFSGSRSGTSASLTISGLQSEDEADYYAATWDDSLNGWVFGGGTKVTVLSG

SEQ ID NO: 465 - protein, 468 aa, synthetic construct
  source 1..468: note = HA-NLS-Keap1-(GS)4-VL12.3 peptide
MYPYDVPDYAPAAKRVKLDGSGSGSQPDPRPSGAGACCRFLPLQSQCPEGAGDAVMYASTECKAEVTPSQHGNRTFSYTLEDHTKQAFGIMNELRLSQQLCDVTLQVKYQDAPAAQFMAHKVVLASSSPVFKAMFTNGLREQGMEVVSIEGIHPKVMERLIEFAYTASISMGEKCVLHVMNGAVMYQIDSVVRACSDFLVQQLDPSNAIGIANFAEQIGCVELHQRAREYIYMHFGEVAKQEEFFNLSHCQLVTLISRDDLNVRCESEVFHACINWVKYDCEQRRFYVQALLRAVRCHSLTPNFLQMQLQKCEILQSDSRCKDYLVKIFEELTLHKPTQVMPCRAPGSGSGSGSGSQPVLTQSPSVSAAPRQRVTISVSGSNSNIGSNTVNWIQQLPGRAPELLMYDDDLLAPGVSDRFSGSRSGTSASLTISGLQSEDEADYYAATWDDSLNGWVFGGGTKVTVLSG

SEQ ID NO: 466 - protein, 470 aa, synthetic construct
  source 1..470: note = HA-NLS-Keap1-(GS)5-VL12.3 peptide
MYPYDVPDYAPAAKRVKLDGSGSGSQPDPRPSGAGACCRFLPLQSQCPEGAGDAVMYASTECKAEVTPSQHGNRTFSYTLEDHTKQAFGIMNELRLSQQLCDVTLQVKYQDAPAAQFMAHKVVLASSSPVFKAMFTNGLREQGMEVVSIEGIHPKVMERLIEFAYTASISMGEKCVLHVMNGAVMYQIDSVVRACSDFLVQQLDPSNAIGIANFAEQIGCVELHQRAREYIYMHFGEVAKQEEFFNLSHCQLVTLISRDDLNVRCESEVFHACINWVKYDCEQRRFYVQALLRAVRCHSLTPNFLQMQLQKCEILQSDSRCKDYLVKIFEELTLHKPTQVMPCRAPGSGSGSGSGSGSQPVLTQSPSVSAAPRQRVTISVSGSNSNIGSNTVNWIQQLPGRAPELLMYDDDLLAPGVSDRFSGSRSGTSASLTISGLQSEDEADYYAATWDDSLNGWVFGGGTKVTVLSG

SEQ ID NO: 467 - protein, 472 aa, synthetic construct
  source 1..472: note = HA-NLS-Keap1-(GS)6-VL12.3 peptide
MYPYDVPDYAPAAKRVKLDGSGSGSQPDPRPSGAGACCRFLPLQSQCPEGAGDAVMYASTECKAEVTPSQHGNRTFSYTLEDHTKQAFGIMNELRLSQQLCDVTLQVKYQDAPAAQFMAHKVVLASSSPVFKAMFTNGLREQGMEVVSIEGIHPKVMERLIEFAYTASISMGEKCVLHVMNGAVMYQIDSVVRACSDFLVQQLDPSNAIGIANFAEQIGCVELHQRAREYIYMHFGEVAKQEEFFNLSHCQLVTLISRDDLNVRCESEVFHACINWVKYDCEQRRFYVQALLRAVRCHSLTPNFLQMQLQKCEILQSDSRCKDYLVKIFEELTLHKPTQVMPCRAPGSGSGSGSGSGSGSQPVLTQSPSVSAAPRQRVTISVSGSNSNIGSNTVNWIQQLPGRAPELLMYDDDLLAPGVSDRFSGSRSGTSASLTISGLQSEDEADYYAATWDDSLNGWVFGGGTKVTVLSG

SEQ ID NO: 468 - protein, 258 aa, synthetic construct
  source 1..258: note = NLS-RNF125-(GS)1-VL12.3 peptide
PAAKRVKLDGSGSGSGSVLSTDSGKSAPASATARALERRRDPELPVTSFDCAVCLEVLHQPVRTRCGHVFCRSCIATSLKNNKWTCPYCRAYLPSEGVPATDVAKRMKSEYKNCAECDTLVCLSEMRAHIRTCQKYIDKYGPGSGSQPVLTQSPSVSAAPRQRVTISVSGSNSNIGSNTVNWIQQLPGRAPELLMYDDDLLAPGVSDRFSGSRSGTSASLTISGLQSEDEADYYAATWDDSLNGWVFGGGTKVTVLSG

SEQ ID NO: 469 - protein, 260 aa, synthetic construct
  source 1..260: note = NLS-RNF125-(GS)2-VL12.3 peptide
PAAKRVKLDGSGSGSGSVLSTDSGKSAPASATARALERRRDPELPVTSFDCAVCLEVLHQPVRTRCGHVFCRSCIATSLKNNKWTCPYCRAYLPSEGVPATDVAKRMKSEYKNCAECDTLVCLSEMRAHIRTCQKYIDKYGPGSGSGSQPVLTQSPSVSAAPRQRVTISVSGSNSNIGSNTVNWIQQLPGRAPELLMYDDDLLAPGVSDRFSGSRSGTSASLTISGLQSEDEADYYAATWDDSLNGWVFGGGTKVTVLSG

SEQ ID NO: 470 - protein, 262 aa, synthetic construct
  source 1..262: note = NLS-RNF125-(GS)3-VL12.3 peptide
PAAKRVKLDGSGSGSGSVLSTDSGKSAPASATARALERRRDPELPVTSFDCAVCLEVLHQPVRTRCGHVFCRSCIATSLKNNKWTCPYCRAYLPSEGVPATDVAKRMKSEYKNCAECDTLVCLSEMRAHIRTCQKYIDKYGPGSGSGSGSQPVLTQSPSVSAAPRQRVTISVSGSNSNIGSNTVNWIQQLPGRAPELLMYDDDLLAPGVSDRFSGSRSGTSASLTISGLQSEDEADYYAATWDDSLNGWVFGGGTKVTVLSG

SEQ ID NO: 471 - protein, 264 aa, synthetic construct
  source 1..264: note = NLS-RNF125-(GS)4-VL12.3 peptide
PAAKRVKLDGSGSGSGSVLSTDSGKSAPASATARALERRRDPELPVTSFDCAVCLEVLHQPVRTRCGHVFCRSCIATSLKNNKWTCPYCRAYLPSEGVPATDVAKRMKSEYKNCAECDTLVCLSEMRAHIRTCQKYIDKYGPGSGSGSGSGSQPVLTQSPSVSAAPRQRVTISVSGSNSNIGSNTVNWIQQLPGRAPELLMYDDDLLAPGVSDRFSGSRSGTSASLTISGLQSEDEADYYAATWDDSLNGWVFGGGTKVTVLSG

SEQ ID NO: 472 - protein, 266 aa, synthetic construct
  source 1..266: note = NLS-RNF125-(GS)5-VL12.3 peptide
PAAKRVKLDGSGSGSGSVLSTDSGKSAPASATARALERRRDPELPVTSFDCAVCLEVLHQPVRTRCGHVFCRSCIATSLKNNKWTCPYCRAYLPSEGVPATDVAKRMKSEYKNCAECDTLVCLSEMRAHIRTCQKYIDKYGPGSGSGSGSGSGSQPVLTQSPSVSAAPRQRVTISVSGSNSNIGSNTVNWIQQLPGRAPELLMYDDDLLAPGVSDRFSGSRSGTSASLTISGLQSEDEADYYAATWDDSLNGWVFGGGTKVTVLSG

SEQ ID NO: 473 - protein, 268 aa, synthetic construct
  source 1..268: note = NLS-RNF125-(GS)6-VL12.3 peptide
PAAKRVKLDGSGSGSGSVLSTDSGKSAPASATARALERRRDPELPVTSFDCAVCLEVLHQPVRTRCGHVFCRSCIATSLKNNKWTCPYCRAYLPSEGVPATDVAKRMKSEYKNCAECDTLVCLSEMRAHIRTCQKYIDKYGPGSGSGSGSGSGSGSQPVLTQSPSVSAAPRQRVTISVSGSNSNIGSNTVNWIQQLPGRAPELLMYDDDLLAPGVSDRFSGSRSGTSASLTISGLQSEDEADYYAATWDDSLNGWVFGGGTKVTVLSG

SEQ ID NO: 474 - protein, 268 aa, synthetic construct
  source 1..268: note = HA-NLS-RNF125-(GS)1-VL12.3 peptide
MYPYDVPDYAPAAKRVKLDGSGSGSGSVLSTDSGKSAPASATARALERRRDPELPVTSFDCAVCLEVLHQPVRTRCGHVFCRSCIATSLKNNKWTCPYCRAYLPSEGVPATDVAKRMKSEYKNCAECDTLVCLSEMRAHIRTCQKYIDKYGPGSGSQPVLTQSPSVSAAPRQRVTISVSGSNSNIGSNTVNWIQQLPGRAPELLMYDDDLLAPGVSDRFSGSRSGTSASLTISGLQSEDEADYYAATWDDSLNGWVFGGGTKVTVLSG

SEQ ID NO: 475 - protein, 270 aa, synthetic construct
  source 1..270: note = HA-NLS-RNF125-(GS)2-VL12.3 peptide
MYPYDVPDYAPAAKRVKLDGSGSGSGSVLSTDSGKSAPASATARALERRRDPELPVTSFDCAVCLEVLHQPVRTRCGHVFCRSCIATSLKNNKWTCPYCRAYLPSEGVPATDVAKRMKSEYKNCAECDTLVCLSEMRAHIRTCQKYIDKYGPGSGSGSQPVLTQSPSVSAAPRQRVTISVSGSNSNIGSNTVNWIQQLPGRAPELLMYDDDLLAPGVSDRFSGSRSGTSASLTISGLQSEDEADYYAATWDDSLNGWVFGGGTKVTVLSG

SEQ ID NO: 476 - protein, 272 aa, synthetic construct
  source 1..272: note = HA-NLS-RNF125-(GS)3-VL12.3 peptide
MYPYDVPDYAPAAKRVKLDGSGSGSGSVLSTDSGKSAPASATARALERRRDPELPVTSFDCAVCLEVLHQPVRTRCGHVFCRSCIATSLKNNKWTCPYCRAYLPSEGVPATDVAKRMKSEYKNCAECDTLVCLSEMRAHIRTCQKYIDKYGPGSGSGSGSQPVLTQSPSVSAAPRQRVTISVSGSNSNIGSNTVNWIQQLPGRAPELLMYDDDLLAPGVSDRFSGSRSGTSASLTISGLQSEDEADYYAATWDDSLNGWVFGGGTKVTVLSG

SEQ ID NO: 477 - protein, 274 aa, synthetic construct
  source 1..274: note = HA-NLS-RNF125-(GS)4-VL12.3 peptide
MYPYDVPDYAPAAKRVKLDGSGSGSGSVLSTDSGKSAPASATARALERRRDPELPVTSFDCAVCLEVLHQPVRTRCGHVFCRSCIATSLKNNKWTCPYCRAYLPSEGVPATDVAKRMKSEYKNCAECDTLVCLSEMRAHIRTCQKYIDKYGPGSGSGSGSGSQPVLTQSPSVSAAPRQRVTISVSGSNSNIGSNTVNWIQQLPGRAPELLMYDDDLLAPGVSDRFSGSRSGTSASLTISGLQSEDEADYYAATWDDSLNGWVFGGGTKVTVLSG

SEQ ID NO: 478 - protein, 276 aa, synthetic construct
  source 1..276: note = HA-NLS-RNF125-(GS)5-VL12.3 peptide
MYPYDVPDYAPAAKRVKLDGSGSGSGSVLSTDSGKSAPASATARALERRRDPELPVTSFDCAVCLEVLHQPVRTRCGHVFCRSCIATSLKNNKWTCPYCRAYLPSEGVPATDVAKRMKSEYKNCAECDTLVCLSEMRAHIRTCQKYIDKYGPGSGSGSGSGSGSQPVLTQSPSVSAAPRQRVTISVSGSNSNIGSNTVNWIQQLPGRAPELLMYDDDLLAPGVSDRFSGSRSGTSASLTISGLQSEDEADYYAATWDDSLNGWVFGGGTKVTVLSG

SEQ ID NO: 479 - protein, 278 aa, synthetic construct
  source 1..278: note = HA-NLS-RNF125-(GS)6-VL12.3 peptide
MYPYDVPDYAPAAKRVKLDGSGSGSGSVLSTDSGKSAPASATARALERRRDPELPVTSFDCAVCLEVLHQPVRTRCGHVFCRSCIATSLKNNKWTCPYCRAYLPSEGVPATDVAKRMKSEYKNCAECDTLVCLSEMRAHIRTCQKYIDKYGPGSGSGSGSGSGSGSQPVLTQSPSVSAAPRQRVTISVSGSNSNIGSNTVNWIQQLPGRAPELLMYDDDLLAPGVSDRFSGSRSGTSASLTISGLQSEDEADYYAATWDDSLNGWVFGGGTKVTVLSG

SEQ ID NO: 480 - protein, 358 aa, synthetic construct
  source 1..358: note = VL12.3-(GS)1-SPOP-NLS peptide
MGSQPVLTQSPSVSAAPRQRVTISVSGSNSNIGSNTVNWIQQLPGRAPELLMYDDDLLAPGVSDRFSGSRSGTSASLTISGLQSEDEADYYAATWDDSLNGWVFGGGTKVTVLSGGSNGLLPDDKLTLFCEVSVVQDSVNISGQNTMNMVKVPECRLADELGGLWENSRFTDCCLCVAGQEFQAHKAILAARSPVFSAMFEHEMEESKKNRVEINDVEPEVFKEMMCFIYTGKAPNLDKMADDLLAAADKYALERLKVMCEDALCSNLSVENAAEILILADLHSADQLKTQAVDFINYHASDVLETSGWKSMVVSHPHLVAEAYRSLASAQCPFLGPPRKRLKQSGSGSPAAKRVKLD

SEQ ID NO: 481 - protein, 360 aa, synthetic construct
  source 1..360: note = VL12.3-(GS)2-SPOP-NLS peptide
MGSQPVLTQSPSVSAAPRQRVTISVSGSNSNIGSNTVNWIQQLPGRAPELLMYDDDLLAPGVSDRFSGSRSGTSASLTISGLQSEDEADYYAATWDDSLNGWVFGGGTKVTVLSGGSGSNGLLPDDKLTLFCEVSVVQDSVNISGQNTMNMVKVPECRLADELGGLWENSRFTDCCLCVAGQEFQAHKAILAARSPVFSAMFEHEMEESKKNRVEINDVEPEVFKEMMCFIYTGKAPNLDKMADDLLAAADKYALERLKVMCEDALCSNLSVENAAEILILADLHSADQLKTQAVDFINYHASDVLETSGWKSMVVSHPHLVAEAYRSLASAQCPFLGPPRKRLKQSGSGSPAAKRVKLD

SEQ ID NO: 482 - protein, 362 aa, synthetic construct
  source 1..362: note = VL12.3-(GS)3-SPOP-NLS peptide
MGSQPVLTQSPSVSAAPRQRVTISVSGSNSNIGSNTVNWIQQLPGRAPELLMYDDDLLAPGVSDRFSGSRSGTSASLTISGLQSEDEADYYAATWDDSLNGWVFGGGTKVTVLSGGSGSGSNGLLPDDKLTLFCEVSVVQDSVNISGQNTMNMVKVPECRLADELGGLWENSRFTDCCLCVAGQEFQAHKAILAARSPVFSAMFEHEMEESKKNRVEINDVEPEVFKEMMCFIYTGKAPNLDKMADDLLAAADKYALERLKVMCEDALCSNLSVENAAEILILADLHSADQLKTQAVDFINYHASDVLETSGWKSMVVSHPHLVAEAYRSLASAQCPFLGPPRKRLKQSGSGSPAAKRVKLD

SEQ ID NO: 483 - protein, 364 aa, synthetic construct
  source 1..364: note = VL12.3-(GS)4-SPOP-NLS peptide
MGSQPVLTQSPSVSAAPRQRVTISVSGSNSNIGSNTVNWIQQLPGRAPELLMYDDDLLAPGVSDRFSGSRSGTSASLTISGLQSEDEADYYAATWDDSLNGWVFGGGTKVTVLSGGSGSGSGSNGLLPDDKLTLFCEVSVVQDSVNISGQNTMNMVKVPECRLADELGGLWENSRFTDCCLCVAGQEFQAHKAILAARSPVFSAMFEHEMEESKKNRVEINDVEPEVFKEMMCFIYTGKAPNLDKMADDLLAAADKYALERLKVMCEDALCSNLSVENAAEILILADLHSADQLKTQAVDFINYHASDVLETSGWKSMVVSHPHLVAEAYRSLASAQCPFLGPPRKRLKQSGSGSPAAKRVKLD

SEQ ID NO: 484 - protein, 367 aa, synthetic construct
  source 1..367: note = VL12.3-(GS)5-SPOP-NLS peptide
MGSQPVLTQSPSVSAAPRQRVTISVSGSNSNIGSNTVNWIQQLPGRAPELLMYDDDLLAPGVSDRFSGSRSGTSASLTISGLQSEDEADYYAATWDDSLNGWVFGGGTKVTVLSGGSGSGSGSGSNGLLPDDKLTLFCEVSVVQDSVNISGQNTMNMVKVPECRLADELGGLWENSRFTDCCLCVAGQEFQAHKAILAARSPVFSAMFEHEMEESKKNRVEINDVEPEVFKEMMCFIYTGKAPNLDKMADDLLAAADKYALERLKVMCEDALCSNLSVENAAEILILADLHSADQLKTQAVDFINYHASDVLETSGWKSMVVSHPHLVAEAYRSLASAQCPFLGPPRKRLKQSGSGSPAAKRVKLDA

SEQ ID NO: 485 - protein, 368 aa, synthetic construct
  source 1..368: note = VL12.3-(GS)6-SPOP-NLS peptide
MGSQPVLTQSPSVSAAPRQRVTISVSGSNSNIGSNTVNWIQQLPGRAPELLMYDDDLLAPGVSDRFSGSRSGTSASLTISGLQSEDEADYYAATWDDSLNGWVFGGGTKVTVLSGGSGSGSGSGSGSNGLLPDDKLTLFCEVSVVQDSVNISGQNTMNMVKVPECRLADELGGLWENSRFTDCCLCVAGQEFQAHKAILAARSPVFSAMFEHEMEESKKNRVEINDVEPEVFKEMMCFIYTGKAPNLDKMADDLLAAADKYALERLKVMCEDALCSNLSVENAAEILILADLHSADQLKTQAVDFINYHASDVLETSGWKSMVVSHPHLVAEAYRSLASAQCPFLGPPRKRLKQSGSGSPAAKRVKLD

SEQ ID NO: 486 - protein, 367 aa, synthetic construct
  source 1..367: note = VL12.3-(GS)1-SPOP-NLS-HA peptide
MGSQPVLTQSPSVSAAPRQRVTISVSGSNSNIGSNTVNWIQQLPGRAPELLMYDDDLLAPGVSDRFSGSRSGTSASLTISGLQSEDEADYYAATWDDSLNGWVFGGGTKVTVLSGGSNGLLPDDKLTLFCEVSVVQDSVNISGQNTMNMVKVPECRLADELGGLWENSRFTDCCLCVAGQEFQAHKAILAARSPVFSAMFEHEMEESKKNRVEINDVEPEVFKEMMCFIYTGKAPNLDKMADDLLAAADKYALERLKVMCEDALCSNLSVENAAEILILADLHSADQLKTQAVDFINYHASDVLETSGWKSMVVSHPHLVAEAYRSLASAQCPFLGPPRKRLKQSGSGSPAAKRVKLDYPYDVPDYA

SEQ ID NO: 487 - protein, 369 aa, synthetic construct
  source 1..369: note = VL12.3-(GS)2-SPOP-NLS-HA peptide
MGSQPVLTQSPSVSAAPRQRVTISVSGSNSNIGSNTVNWIQQLPGRAPELLMYDDDLLAPGVSDRFSGSRSGTSASLTISGLQSEDEADYYAATWDDSLNGWVFGGGTKVTVLSGGSGSNGLLPDDKLTLFCEVSVVQDSVNISGQNTMNMVKVPECRLADELGGLWENSRFTDCCLCVAGQEFQAHKAILAARSPVFSAMFEHEMEESKKNRVEINDVEPEVFKEMMCFIYTGKAPNLDKMADDLLAAADKYALERLKVMCEDALCSNLSVENAAEILILADLHSADQLKTQAVDFINYHASDVLETSGWKSMVVSHPHLVAEAYRSLASAQCPFLGPPRKRLKQSGSGSPAAKRVKLDYPYDVPDYA

SEQ ID NO: 488 - protein, 371 aa, synthetic construct
  source 1..371: note = VL12.3-(GS)3-SPOP-NLS-HA peptide
MGSQPVLTQSPSVSAAPRQRVTISVSGSNSNIGSNTVNWIQQLPGRAPELLMYDDDLLAPGVSDRFSGSRSGTSASLTISGLQSEDEADYYAATWDDSLNGWVFGGGTKVTVLSGGSGSGSNGLLPDDKLTLFCEVSVVQDSVNISGQNTMNMVKVPECRLADELGGLWENSRFTDCCLCVAGQEFQAHKAILAARSPVFSAMFEHEMEESKKNRVEINDVEPEVFKEMMCFIYTGKAPNLDKMADDLLAAADKYALERLKVMCEDALCSNLSVENAAEILILADLHSADQLKTQAVDFINYHASDVLETSGWKSMVVSHPHLVAEAYRSLASAQCPFLGPPRKRLKQSGSGSPAAKRVKLDYPYDVPDYA

SEQ ID NO: 489 - protein, 373 aa, synthetic construct
  source 1..373: note = VL12.3-(GS)4-SPOP-NLS-HA peptide
MGSQPVLTQSPSVSAAPRQRVTISVSGSNSNIGSNTVNWIQQLPGRAPELLMYDDDLLAPGVSDRFSGSRSGTSASLTISGLQSEDEADYYAATWDDSLNGWVFGGGTKVTVLSGGSGSGSGSNGLLPDDKLTLFCEVSVVQDSVNISGQNTMNMVKVPECRLADELGGLWENSRFTDCCLCVAGQEFQAHKAILAARSPVFSAMFEHEMEESKKNRVEINDVEPEVFKEMMCFIYTGKAPNLDKMADDLLAAADKYALERLKVMCEDALCSNLSVENAAEILILADLHSADQLKTQAVDFINYHASDVLETSGWKSMVVSHPHLVAEAYRSLASAQCPFLGPPRKRLKQSGSGSPAAKRVKLDYPYDVPDYA

SEQ ID NO: 490 - protein, 376 aa, synthetic construct
  source 1..376: note = VL12.3-(GS)5-SPOP-NLS-HA peptide
MGSQPVLTQSPSVSAAPRQRVTISVSGSNSNIGSNTVNWIQQLPGRAPELLMYDDDLLAPGVSDRFSGSRSGTSASLTISGLQSEDEADYYAATWDDSLNGWVFGGGTKVTVLSGGSGSGSGSGSNGLLPDDKLTLFCEVSVVQDSVNISGQNTMNMVKVPECRLADELGGLWENSRFTDCCLCVAGQEFQAHKAILAARSPVFSAMFEHEMEESKKNRVEINDVEPEVFKEMMCFIYTGKAPNLDKMADDLLAAADKYALERLKVMCEDALCSNLSVENAAEILILADLHSADQLKTQAVDFINYHASDVLETSGWKSMVVSHPHLVAEAYRSLASAQCPFLGPPRKRLKQSGSGSPAAKRVKLDYPYDVPDYAA

SEQ ID NO: 491 - protein, 377 aa, synthetic construct
  source 1..377: note = VL12.3-(GS)6-SPOP-NLS-HA peptide
MGSQPVLTQSPSVSAAPRQRVTISVSGSNSNIGSNTVNWIQQLPGRAPELLMYDDDLLAPGVSDRFSGSRSGTSASLTISGLQSEDEADYYAATWDDSLNGWVFGGGTKVTVLSGGSGSGSGSGSGSNGLLPDDKLTLFCEVSVVQDSVNISGQNTMNMVKVPECRLADELGGLWENSRFTDCCLCVAGQEFQAHKAILAARSPVFSAMFEHEMEESKKNRVEINDVEPEVFKEMMCFIYTGKAPNLDKMADDLLAAADKYALERLKVMCEDALCSNLSVENAAEILILADLHSADQLKTQAVDFINYHASDVLETSGWKSMVVSHPHLVAEAYRSLASAQCPFLGPPRKRLKQSGSGSPAAKRVKLDYPYDVPDYA

SEQ ID NO: 492 - protein, 297 aa, synthetic construct
  source 1..297: note = VL12.3-(GS)1-CHIP peptide
MGSQPVLTQSPSVSAAPRQRVTISVSGSNSNIGSNTVNWIQQLPGRAPELLMYDDDLLAPGVSDRFSGSRSGTSASLTISGLQSEDEADYYAATWDDSLNGWVFGGGTKVTVLSGGSRLNFGDDIPSALRIAKKKRWNSIEERRIHQESELHSYLSRLIAAERERELEECQRNHEGDEDDSHVRAQQACIEAKHDKYMADMDELFSQVDEKRKKRDIPDYLCGKISFELMREPCITPSGITYDRKDIEEHLQRVGHFDPVTRSPLTQEQLIPNLAMKEVIDAFISENGWVEDYGSGS

SEQ ID NO: 493 - protein, 299 aa, synthetic construct
  source 1..299: note = VL12.3-(GS)2-CHIP peptide
MGSQPVLTQSPSVSAAPRQRVTISVSGSNSNIGSNTVNWIQQLPGRAPELLMYDDDLLAPGVSDRFSGSRSGTSASLTISGLQSEDEADYYAATWDDSLNGWVFGGGTKVTVLSGGSGSRLNFGDDIPSALRIAKKKRWNSIEERRIHQESELHSYLSRLIAAERERELEECQRNHEGDEDDSHVRAQQACIEAKHDKYMADMDELFSQVDEKRKKRDIPDYLCGKISFELMREPCITPSGITYDRKDIEEHLQRVGHFDPVTRSPLTQEQLIPNLAMKEVIDAFISENGWVEDYGSGS

SEQ ID NO: 494 - protein, 301 aa, synthetic construct
  source 1..301: note = VL12.3-(GS)3-CHIP peptide
MGSQPVLTQSPSVSAAPRQRVTISVSGSNSNIGSNTVNWIQQLPGRAPELLMYDDDLLAPGVSDRFSGSRSGTSASLTISGLQSEDEADYYAATWDDSLNGWVFGGGTKVTVLSGGSGSGSRLNFGDDIPSALRIAKKKRWNSIEERRIHQESELHSYLSRLIAAERERELEECQRNHEGDEDDSHVRAQQACIEAKHDKYMADMDELFSQVDEKRKKRDIPDYLCGKISFELMREPCITPSGITYDRKDIEEHLQRVGHFDPVTRSPLTQEQLIPNLAMKEVIDAFISENGWVEDYGSGS

SEQ ID NO: 495 - protein, 303 aa, synthetic construct
  source 1..303: note = VL12.3-(GS)4-CHIP peptide
MGSQPVLTQSPSVSAAPRQRVTISVSGSNSNIGSNTVNWIQQLPGRAPELLMYDDDLLAPGVSDRFSGSRSGTSASLTISGLQSEDEADYYAATWDDSLNGWVFGGGTKVTVLSGGSGSGSGSRLNFGDDIPSALRIAKKKRWNSIEERRIHQESELHSYLSRLIAAERERELEECQRNHEGDEDDSHVRAQQACIEAKHDKYMADMDELFSQVDEKRKKRDIPDYLCGKISFELMREPCITPSGITYDRKDIEEHLQRVGHFDPVTRSPLTQEQLIPNLAMKEVIDAFISENGWVEDYGSGS

SEQ ID NO: 496 - protein, 305 aa, synthetic construct
  source 1..305: note = VL12.3-(GS)5-CHIP peptide
MGSQPVLTQSPSVSAAPRQRVTISVSGSNSNIGSNTVNWIQQLPGRAPELLMYDDDLLAPGVSDRFSGSRSGTSASLTISGLQSEDEADYYAATWDDSLNGWVFGGGTKVTVLSGGSGSGSGSGSRLNFGDDIPSALRIAKKKRWNSIEERRIHQESELHSYLSRLIAAERERELEECQRNHEGDEDDSHVRAQQACIEAKHDKYMADMDELFSQVDEKRKKRDIPDYLCGKISFELMREPCITPSGITYDRKDIEEHLQRVGHFDPVTRSPLTQEQLIPNLAMKEVIDAFISENGWVEDYGSGS

SEQ ID NO: 497 - protein, 307 aa, synthetic construct
  source 1..307: note = VL12.3-(GS)6-CHIP peptide
MGSQPVLTQSPSVSAAPRQRVTISVSGSNSNIGSNTVNWIQQLPGRAPELLMYDDDLLAPGVSDRFSGSRSGTSASLTISGLQSEDEADYYAATWDDSLNGWVFGGGTKVTVLSGGSGSGSGSGSGSRLNFGDDIPSALRIAKKKRWNSIEERRIHQESELHSYLSRLIAAERERELEECQRNHEGDEDDSHVRAQQACIEAKHDKYMADMDELFSQVDEKRKKRDIPDYLCGKISFELMREPCITPSGITYDRKDIEEHLQRVGHFDPVTRSPLTQEQLIPNLAMKEVIDAFISENGWVEDYGSGS

SEQ ID NO: 498 - protein, 306 aa, synthetic construct
  source 1..306: note = VL12.3-(GS)1-CHIP-HA peptide
MGSQPVLTQSPSVSAAPRQRVTISVSGSNSNIGSNTVNWIQQLPGRAPELLMYDDDLLAPGVSDRFSGSRSGTSASLTISGLQSEDEADYYAATWDDSLNGWVFGGGTKVTVLSGGSRLNFGDDIPSALRIAKKKRWNSIEERRIHQESELHSYLSRLIAAERERELEECQRNHEGDEDDSHVRAQQACIEAKHDKYMADMDELFSQVDEKRKKRDIPDYLCGKISFELMREPCITPSGITYDRKDIEEHLQRVGHFDPVTRSPLTQEQLIPNLAMKEVIDAFISENGWVEDYGSGSYPYDVPDYA

SEQ ID NO: 499 - protein, 308 aa, synthetic construct
  source 1..308: note = VL12.3-(GS)2-CHIP-HA peptide
MGSQPVLTQSPSVSAAPRQRVTISVSGSNSNIGSNTVNWIQQLPGRAPELLMYDDDLLAPGVSDRFSGSRSGTSASLTISGLQSEDEADYYAATWDDSLNGWVFGGGTKVTVLSGGSGSRLNFGDDIPSALRIAKKKRWNSIEERRIHQESELHSYLSRLIAAERERELEECQRNHEGDEDDSHVRAQQACIEAKHDKYMADMDELFSQVDEKRKKRDIPDYLCGKISFELMREPCITPSGITYDRKDIEEHLQRVGHFDPVTRSPLTQEQLIPNLAMKEVIDAFISENGWVEDYGSGSYPYDVPDYA

SEQ ID NO: 500 - protein, 310 aa, synthetic construct
  source 1..310: note = VL12.3-(GS)3-CHIP-HA peptide
MGSQPVLTQSPSVSAAPRQRVTISVSGSNSNIGSNTVNWIQQLPGRAPELLMYDDDLLAPGVSDRFSGSRSGTSASLTISGLQSEDEADYYAATWDDSLNGWVFGGGTKVTVLSGGSGSGSRLNFGDDIPSALRIAKKKRWNSIEERRIHQESELHSYLSRLIAAERERELEECQRNHEGDEDDSHVRAQQACIEAKHDKYMADMDELFSQVDEKRKKRDIPDYLCGKISFELMREPCITPSGITYDRKDIEEHLQRVGHFDPVTRSPLTQEQLIPNLAMKEVIDAFISENGWVEDYGSGSYPYDVPDYA

SEQ ID NO: 501 - protein, 312 aa, synthetic construct
  source 1..312: note = VL12.3-(GS)4-CHIP-HA peptide
MGSQPVLTQSPSVSAAPRQRVTISVSGSNSNIGSNTVNWIQQLPGRAPELLMYDDDLLAPGVSDRFSGSRSGTSASLTISGLQSEDEADYYAATWDDSLNGWVFGGGTKVTVLSGGSGSGSGSRLNFGDDIPSALRIAKKKRWNSIEERRIHQESELHSYLSRLIAAERERELEECQRNHEGDEDDSHVRAQQACIEAKHDKYMADMDELFSQVDEKRKKRDIPDYLCGKISFELMREPCITPSGITYDRKDIEEHLQRVGHFDPVTRSPLTQEQLIPNLAMKEVIDAFISENGWVEDYGSGSYPYDVPDYA

SEQ ID NO: 502 - protein, 314 aa, synthetic construct
  source 1..314: note = VL12.3-(GS)5-CHIP-HA peptide
MGSQPVLTQSPSVSAAPRQRVTISVSGSNSNIGSNTVNWIQQLPGRAPELLMYDDDLLAPGVSDRFSGSRSGTSASLTISGLQSEDEADYYAATWDDSLNGWVFGGGTKVTVLSGGSGSGSGSGSRLNFGDDIPSALRIAKKKRWNSIEERRIHQESELHSYLSRLIAAERERELEECQRNHEGDEDDSHVRAQQACIEAKHDKYMADMDELFSQVDEKRKKRDIPDYLCGKISFELMREPCITPSGITYDRKDIEEHLQRVGHFDPVTRSPLTQEQLIPNLAMKEVIDAFISENGWVEDYGSGSYPYDVPDYA

SEQ ID NO: 503 - protein, 316 aa, synthetic construct
  source 1..316: note = VL12.3-(GS)6-CHIP-HA peptide
MGSQPVLTQSPSVSAAPRQRVTISVSGSNSNIGSNTVNWIQQLPGRAPELLMYDDDLLAPGVSDRFSGSRSGTSASLTISGLQSEDEADYYAATWDDSLNGWVFGGGTKVTVLSGGSGSGSGSGSGSRLNFGDDIPSALRIAKKKRWNSIEERRIHQESELHSYLSRLIAAERERELEECQRNHEGDEDDSHVRAQQACIEAKHDKYMADMDELFSQVDEKRKKRDIPDYLCGKISFELMREPCITPSGITYDRKDIEEHLQRVGHFDPVTRSPLTQEQLIPNLAMKEVIDAFISENGWVEDYGSGSYPYDVPDYA

SEQ ID NO: 504 - protein, 151 aa, synthetic construct
  source 1..151: note = DCAF1-(GS)1-VL12.3 peptide
QAPINFTSRLNRRASFPKYGGVDGGCFDRHLIFSRGSGSQPVLTQSPSVSAAPRQRVTISVSGSNSNIGSNTVNWIQQLPGRAPELLMYDDDLLAPGVSDRFSGSRSGTSASLTISGLQSEDEADYYAATWDDSLNGWVFGGGTKVTVLSG

SEQ ID NO: 505 - protein, 153 aa, synthetic construct
  source 1..153: note = DCAF1-(GS)2-VL12.3 peptide
QAPINFTSRLNRRASFPKYGGVDGGCFDRHLIFSRGSGSGSQPVLTQSPSVSAAPRQRVTISVSGSNSNIGSNTVNWIQQLPGRAPELLMYDDDLLAPGVSDRFSGSRSGTSASLTISGLQSEDEADYYAATWDDSLNGWVFGGGTKVTVLSG

SEQ ID NO: 506 - protein, 155 aa, synthetic construct
  source 1..155: note = DCAF1-(GS)3-VL12.3 peptide
QAPINFTSRLNRRASFPKYGGVDGGCFDRHLIFSRGSGSGSGSQPVLTQSPSVSAAPRQRVTISVSGSNSNIGSNTVNWIQQLPGRAPELLMYDDDLLAPGVSDRFSGSRSGTSASLTISGLQSEDEADYYAATWDDSLNGWVFGGGTKVTVLSG

SEQ ID NO: 507 - protein, 157 aa, synthetic construct
  source 1..157: note = DCAF1-(GS)4-VL12.3 peptide
QAPINFTSRLNRRASFPKYGGVDGGCFDRHLIFSRGSGSGSGSGSQPVLTQSPSVSAAPRQRVTISVSGSNSNIGSNTVNWIQQLPGRAPELLMYDDDLLAPGVSDRFSGSRSGTSASLTISGLQSEDEADYYAATWDDSLNGWVFGGGTKVTVLSG

SEQ ID NO: 508 - protein, 159 aa, synthetic construct
  source 1..159: note = DCAF1-(GS)5-VL12.3 peptide
QAPINFTSRLNRRASFPKYGGVDGGCFDRHLIFSRGSGSGSGSGSGSQPVLTQSPSVSAAPRQRVTISVSGSNSNIGSNTVNWIQQLPGRAPELLMYDDDLLAPGVSDRFSGSRSGTSASLTISGLQSEDEADYYAATWDDSLNGWVFGGGTKVTVLSG

SEQ ID NO: 509 - protein, 161 aa, synthetic construct
  source 1..161: note = DCAF1-(GS)6-VL12.3 peptide
QAPINFTSRLNRRASFPKYGGVDGGCFDRHLIFSRGSGSGSGSGSGSGSQPVLTQSPSVSAAPRQRVTISVSGSNSNIGSNTVNWIQQLPGRAPELLMYDDDLLAPGVSDRFSGSRSGTSASLTISGLQSEDEADYYAATWDDSLNGWVFGGGTKVTVLSG

SEQ ID NO: 510 - protein, 167 aa, synthetic construct
  source 1..167: note = HA-DCAF1-(GS)1-VL12.3 peptide
MYPYDVPDYAGSGSGSQAPINFTSRLNRRASFPKYGGVDGGCFDRHLIFSRGSGSQPVLTQSPSVSAAPRQRVTISVSGSNSNIGSNTVNWIQQLPGRAPELLMYDDDLLAPGVSDRFSGSRSGTSASLTISGLQSEDEADYYAATWDDSLNGWVFGGGTKVTVLSG

SEQ ID NO: 511 - protein, 169 aa, synthetic construct
  source 1..169: note = HA-DCAF1-(GS)2-VL12.3 peptide
MYPYDVPDYAGSGSGSQAPINFTSRLNRRASFPKYGGVDGGCFDRHLIFSRGSGSGSQPVLTQSPSVSAAPRQRVTISVSGSNSNIGSNTVNWIQQLPGRAPELLMYDDDLLAPGVSDRFSGSRSGTSASLTISGLQSEDEADYYAATWDDSLNGWVFGGGTKVTVLSG

SEQ ID NO: 512 - protein, 171 aa, synthetic construct
  source 1..171: note = HA-DCAF1-(GS)3-VL12.3 peptide
MYPYDVPDYAGSGSGSQAPINFTSRLNRRASFPKYGGVDGGCFDRHLIFSRGSGSGSGSQPVLTQSPSVSAAPRQRVTISVSGSNSNIGSNTVNWIQQLPGRAPELLMYDDDLLAPGVSDRFSGSRSGTSASLTISGLQSEDEADYYAATWDDSLNGWVFGGGTKVTVLSG

SEQ ID NO: 513 - protein, 173 aa, synthetic construct
  source 1..173: note = HA-DCAF1-(GS)4-VL12.3 peptide
MYPYDVPDYAGSGSGSQAPINFTSRLNRRASFPKYGGVDGGCFDRHLIFSRGSGSGSGSGSQPVLTQSPSVSAAPRQRVTISVSGSNSNIGSNTVNWIQQLPGRAPELLMYDDDLLAPGVSDRFSGSRSGTSASLTISGLQSEDEADYYAATWDDSLNGWVFGGGTKVTVLSG

SEQ ID NO: 514 - protein, 175 aa, synthetic construct
  source 1..175: note = HA-DCAF1-(GS)5-VL12.3 peptide
MYPYDVPDYAGSGSGSQAPINFTSRLNRRASFPKYGGVDGGCFDRHLIFSRGSGSGSGSGSGSQPVLTQSPSVSAAPRQRVTISVSGSNSNIGSNTVNWIQQLPGRAPELLMYDDDLLAPGVSDRFSGSRSGTSASLTISGLQSEDEADYYAATWDDSLNGWVFGGGTKVTVLSG

SEQ ID NO: 515 - protein, 177 aa, synthetic construct
  source 1..177: note = HA-DCAF1-(GS)6-VL12.3 peptide
MYPYDVPDYAGSGSGSQAPINFTSRLNRRASFPKYGGVDGGCFDRHLIFSRGSGSGSGSGSGSGSQPVLTQSPSVSAAPRQRVTISVSGSNSNIGSNTVNWIQQLPGRAPELLMYDDDLLAPGVSDRFSGSRSGTSASLTISGLQSEDEADYYAATWDDSLNGWVFGGGTKVTVLSG

SEQ ID NO: 516 - protein, 472 aa, synthetic construct
  source 1..472: note = VL12.3-(GS)1-E6AP peptide
GSQPVLTQSPSVSAAPRQRVTISVSGSNSNIGSNTVNWIQQLPGRAPELLMYDDDLLAPGVSDRFSGSRSGTSASLTISGLQSEDEADYYAATWDDSLNGWVFGGGTKVTVLSGGSNPYLRLKVRRDHIIDDALVRLEMIAMENPADLKKQLYVEFEGEQGVDEGGVSKEFFQLVVEEIFNPDIGMFTYDESTKLFWFNPSSFETEGQFTLIGIVLGLAIYNNCILDVHFPMVVYRKLMGKKGTFRDLGDSHPVLYQSLKDLLEYEGNVEDDMMITFQISQTDLFGNPMMYDLKENGDKIPITNENRKEFVNLYSDYILNKSVEKQFKAFRRGFHMVTNESPLKYLFRPEEIELLICGSRNLDFQALEETTEYDGGYTRDSVLIREFWEIVHSFTDEQKRLFLQFTTGTDRAPVGGLGKLKMIIAKNGPDTERLPTSHTCFNVLLLPEYSSKEKLKERLLKAITYAKGFGML

SEQ ID NO: 517 - protein, 474 aa, synthetic construct
  source 1..474: note = VL12.3-(GS)2-E6AP peptide
GSQPVLTQSPSVSAAPRQRVTISVSGSNSNIGSNTVNWIQQLPGRAPELLMYDDDLLAPGVSDRFSGSRSGTSASLTISGLQSEDEADYYAATWDDSLNGWVFGGGTKVTVLSGGSGSNPYLRLKVRRDHIIDDALVRLEMIAMENPADLKKQLYVEFEGEQGVDEGGVSKEFFQLVVEEIFNPDIGMFTYDESTKLFWFNPSSFETEGQFTLIGIVLGLAIYNNCILDVHFPMVVYRKLMGKKGTFRDLGDSHPVLYQSLKDLLEYEGNVEDDMMITFQISQTDLFGNPMMYDLKENGDKIPITNENRKEFVNLYSDYILNKSVEKQFKAFRRGFHMVTNESPLKYLFRPEEIELLICGSRNLDFQALEETTEYDGGYTRDSVLIREFWEIVHSFTDEQKRLFLQFTTGTDRAPVGGLGKLKMIIAKNGPDTERLPTSHTCFNVLLLPEYSSKEKLKERLLKAITYAKGFGML

SEQ ID NO: 518 - protein, 476 aa, synthetic construct
  source 1..476: note = VL12.3-(GS)3-E6AP peptide
GSQPVLTQSPSVSAAPRQRVTISVSGSNSNIGSNTVNWIQQLPGRAPELLMYDDDLLAPGVSDRFSGSRSGTSASLTISGLQSEDEADYYAATWDDSLNGWVFGGGTKVTVLSGGSGSGSNPYLRLKVRRDHIIDDALVRLEMIAMENPADLKKQLYVEFEGEQGVDEGGVSKEFFQLVVEEIFNPDIGMFTYDESTKLFWFNPSSFETEGQFTLIGIVLGLAIYNNCILDVHFPMVVYRKLMGKKGTFRDLGDSHPVLYQSLKDLLEYEGNVEDDMMITFQISQTDLFGNPMMYDLKENGDKIPITNENRKEFVNLYSDYILNKSVEKQFKAFRRGFHMVTNESPLKYLFRPEEIELLICGSRNLDFQALEETTEYDGGYTRDSVLIREFWEIVHSFTDEQKRLFLQFTTGTDRAPVGGLGKLKMIIAKNGPDTERLPTSHTCFNVLLLPEYSSKEKLKERLLKAITYAKGFGML

SEQ ID NO: 519 - protein, 478 aa, synthetic construct
  source 1..478: note = VL12.3-(GS)4-E6AP peptide
GSQPVLTQSPSVSAAPRQRVTISVSGSNSNIGSNTVNWIQQLPGRAPELLMYDDDLLAPGVSDRFSGSRSGTSASLTISGLQSEDEADYYAATWDDSLNGWVFGGGTKVTVLSGGSGSGSGSNPYLRLKVRRDHIIDDALVRLEMIAMENPADLKKQLYVEFEGEQGVDEGGVSKEFFQLVVEEIFNPDIGMFTYDESTKLFWFNPSSFETEGQFTLIGIVLGLAIYNNCILDVHFPMVVYRKLMGKKGTFRDLGDSHPVLYQSLKDLLEYEGNVEDDMMITFQISQTDLFGNPMMYDLKENGDKIPITNENRKEFVNLYSDYILNKSVEKQFKAFRRGFHMVTNESPLKYLFRPEEIELLICGSRNLDFQALEETTEYDGGYTRDSVLIREFWEIVHSFTDEQKRLFLQFTTGTDRAPVGGLGKLKMIIAKNGPDTERLPTSHTCFNVLLLPEYSSKEKLKERLLKAITYAKGFGML

SEQ ID NO: 520 - protein, 480 aa, synthetic construct
  source 1..480: note = VL12.3-(GS)5-E6AP peptide
GSQPVLTQSPSVSAAPRQRVTISVSGSNSNIGSNTVNWIQQLPGRAPELLMYDDDLLAPGVSDRFSGSRSGTSASLTISGLQSEDEADYYAATWDDSLNGWVFGGGTKVTVLSGGSGSGSGSGSNPYLRLKVRRDHIIDDALVRLEMIAMENPADLKKQLYVEFEGEQGVDEGGVSKEFFQLVVEEIFNPDIGMFTYDESTKLFWFNPSSFETEGQFTLIGIVLGLAIYNNCILDVHFPMVVYRKLMGKKGTFRDLGDSHPVLYQSLKDLLEYEGNVEDDMMITFQISQTDLFGNPMMYDLKENGDKIPITNENRKEFVNLYSDYILNKSVEKQFKAFRRGFHMVTNESPLKYLFRPEEIELLICGSRNLDFQALEETTEYDGGYTRDSVLIREFWEIVHSFTDEQKRLFLQFTTGTDRAPVGGLGKLKMIIAKNGPDTERLPTSHTCFNVLLLPEYSSKEKLKERLLKAITYAKGFGML

SEQ ID NO: 521 - protein, 482 aa, synthetic construct
  source 1..482: note = VL12.3-(GS)6-E6AP peptide
GSQPVLTQSPSVSAAPRQRVTISVSGSNSNIGSNTVNWIQQLPGRAPELLMYDDDLLAPGVSDRFSGSRSGTSASLTISGLQSEDEADYYAATWDDSLNGWVFGGGTKVTVLSGGSGSGSGSGSGSNPYLRLKVRRDHIIDDALVRLEMIAMENPADLKKQLYVEFEGEQGVDEGGVSKEFFQLVVEEIFNPDIGMFTYDESTKLFWFNPSSFETEGQFTLIGIVLGLAIYNNCILDVHFPMVVYRKLMGKKGTFRDLGDSHPVLYQSLKDLLEYEGNVEDDMMITFQISQTDLFGNPMMYDLKENGDKIPITNENRKEFVNLYSDYILNKSVEKQFKAFRRGFHMVTNESPLKYLFRPEEIELLICGSRNLDFQALEETTEYDGGYTRDSVLIREFWEIVHSFTDEQKRLFLQFTTGTDRAPVGGLGKLKMIIAKNGPDTERLPTSHTCFNVLLLPEYSSKEKLKERLLKAITYAKGFGML

SEQ ID NO: 522 - protein, 488 aa, synthetic construct
  source 1..488: note = HA-VL12.3-(GS)1-E6AP peptide
MYPYDVPDYAGSGSGSGSQPVLTQSPSVSAAPRQRVTISVSGSNSNIGSNTVNWIQQLPGRAPELLMYDDDLLAPGVSDRFSGSRSGTSASLTISGLQSEDEADYYAATWDDSLNGWVFGGGTKVTVLSGGSNPYLRLKVRRDHIIDDALVRLEMIAMENPADLKKQLYVEFEGEQGVDEGGVSKEFFQLVVEEIFNPDIGMFTYDESTKLFWFNPSSFETEGQFTLIGIVLGLAIYNNCILDVHFPMVVYRKLMGKKGTFRDLGDSHPVLYQSLKDLLEYEGNVEDDMMITFQISQTDLFGNPMMYDLKENGDKIPITNENRKEFVNLYSDYILNKSVEKQFKAFRRGFHMVTNESPLKYLFRPEEIELLICGSRNLDFQALEETTEYDGGYTRDSVLIREFWEIVHSFTDEQKRLFLQFTTGTDRAPVGGLGKLKMIIAKNGPDTERLPTSHTCFNVLLLPEYSSKEKLKERLLKAITYAKGFGML

SEQ ID NO: 523 - protein, 490 aa, synthetic construct
  source 1..490: note = HA-VL12.3-(GS)2-E6AP peptide
MYPYDVPDYAGSGSGSGSQPVLTQSPSVSAAPRQRVTISVSGSNSNIGSNTVNWIQQLPGRAPELLMYDDDLLAPGVSDRFSGSRSGTSASLTISGLQSEDEADYYAATWDDSLNGWVFGGGTKVTVLSGGSGSNPYLRLKVRRDHIIDDALVRLEMIAMENPADLKKQLYVEFEGEQGVDEGGVSKEFFQLVVEEIFNPDIGMFTYDESTKLFWFNPSSFETEGQFTLIGIVLGLAIYNNCILDVHFPMVVYRKLMGKKGTFRDLGDSHPVLYQSLKDLLEYEGNVEDDMMITFQISQTDLFGNPMMYDLKENGDKIPITNENRKEFVNLYSDYILNKSVEKQFKAFRRGFHMVTNESPLKYLFRPEEIELLICGSRNLDFQALEETTEYDGGYTRDSVLIREFWEIVHSFTDEQKRLFLQFTTGTDRAPVGGLGKLKMIIAKNGPDTERLPTSHTCFNVLLLPEYSSKEKLKERLLKAITYAKGFGML

SEQ ID NO: 524 - protein, 492 aa, synthetic construct
  source 1..492: note = HA-VL12.3-(GS)3-E6AP peptide
MYPYDVPDYAGSGSGSGSQPVLTQSPSVSAAPRQRVTISVSGSNSNIGSNTVNWIQQLPGRAPELLMYDDDLLAPGVSDRFSGSRSGTSASLTISGLQSEDEADYYAATWDDSLNGWVFGGGTKVTVLSGGSGSGSNPYLRLKVRRDHIIDDALVRLEMIAMENPADLKKQLYVEFEGEQGVDEGGVSKEFFQLVVEEIFNPDIGMFTYDESTKLFWFNPSSFETEGQFTLIGIVLGLAIYNNCILDVHFPMVVYRKLMGKKGTFRDLGDSHPVLYQSLKDLLEYEGNVEDDMMITFQISQTDLFGNPMMYDLKENGDKIPITNENRKEFVNLYSDYILNKSVEKQFKAFRRGFHMVTNESPLKYLFRPEEIELLICGSRNLDFQALEETTEYDGGYTRDSVLIREFWEIVHSFTDEQKRLFLQFTTGTDRAPVGGLGKLKMIIAKNGPDTERLPTSHTCFNVLLLPEYSSKEKLKERLLKAITYAKGFGML

SEQ ID NO: 525 - protein, 494 aa, synthetic construct
  source 1..494: note = HA-VL12.3-(GS)4-E6AP peptide
MYPYDVPDYAGSGSGSGSQPVLTQSPSVSAAPRQRVTISVSGSNSNIGSNTVNWIQQLPGRAPELLMYDDDLLAPGVSDRFSGSRSGTSASLTISGLQSEDEADYYAATWDDSLNGWVFGGGTKVTVLSGGSGSGSGSNPYLRLKVRRDHIIDDALVRLEMIAMENPADLKKQLYVEFEGEQGVDEGGVSKEFFQLVVEEIFNPDIGMFTYDESTKLFWFNPSSFETEGQFTLIGIVLGLAIYNNCILDVHFPMVVYRKLMGKKGTFRDLGDSHPVLYQSLKDLLEYEGNVEDDMMITFQISQTDLFGNPMMYDLKENGDKIPITNENRKEFVNLYSDYILNKSVEKQFKAFRRGFHMVTNESPLKYLFRPEEIELLICGSRNLDFQALEETTEYDGGYTRDSVLIREFWEIVHSFTDEQKRLFLQFTTGTDRAPVGGLGKLKMIIAKNGPDTERLPTSHTCFNVLLLPEYSSKEKLKERLLKAITYAKGFGML

SEQ ID NO: 526 - protein, 496 aa, synthetic construct
  source 1..496: note = HA-VL12.3-(GS)5-E6AP peptide
MYPYDVPDYAGSGSGSGSQPVLTQSPSVSAAPRQRVTISVSGSNSNIGSNTVNWIQQLPGRAPELLMYDDDLLAPGVSDRFSGSRSGTSASLTISGLQSEDEADYYAATWDDSLNGWVFGGGTKVTVLSGGSGSGSGSGSNPYLRLKVRRDHIIDDALVRLEMIAMENPADLKKQLYVEFEGEQGVDEGGVSKEFFQLVVEEIFNPDIGMFTYDESTKLFWFNPSSFETEGQFTLIGIVLGLAIYNNCILDVHFPMVVYRKLMGKKGTFRDLGDSHPVLYQSLKDLLEYEGNVEDDMMITFQISQTDLFGNPMMYDLKENGDKIPITNENRKEFVNLYSDYILNKSVEKQFKAFRRGFHMVTNESPLKYLFRPEEIELLICGSRNLDFQALEETTEYDGGYTRDSVLIREFWEIVHSFTDEQKRLFLQFTTGTDRAPVGGLGKLKMIIAKNGPDTERLPTSHTCFNVLLLPEYSSKEKLKERLLKAITYAKGFGML

SEQ ID NO: 527 - protein, 498 aa, synthetic construct
  source 1..498: note = HA-VL12.3-(GS)6-E6AP peptide
MYPYDVPDYAGSGSGSGSQPVLTQSPSVSAAPRQRVTISVSGSNSNIGSNTVNWIQQLPGRAPELLMYDDDLLAPGVSDRFSGSRSGTSASLTISGLQSEDEADYYAATWDDSLNGWVFGGGTKVTVLSGGSGSGSGSGSGSNPYLRLKVRRDHIIDDALVRLEMIAMENPADLKKQLYVEFEGEQGVDEGGVSKEFFQLVVEEIFNPDIGMFTYDESTKLFWFNPSSFETEGQFTLIGIVLGLAIYNNCILDVHFPMVVYRKLMGKKGTFRDLGDSHPVLYQSLKDLLEYEGNVEDDMMITFQISQTDLFGNPMMYDLKENGDKIPITNENRKEFVNLYSDYILNKSVEKQFKAFRRGFHMVTNESPLKYLFRPEEIELLICGSRNLDFQALEETTEYDGGYTRDSVLIREFWEIVHSFTDEQKRLFLQFTTGTDRAPVGGLGKLKMIIAKNGPDTERLPTSHTCFNVLLLPEYSSKEKLKERLLKAITYAKGFGML

SEQ ID NO: 528 - protein, 403 aa, synthetic construct
  source 1..403: note = FBXW7b-(GS)1-VL12.3 peptide
CVPRSGLILSCICLYCGVLLPVLLPNLPFLTCLSMSTLESVTYLPEKGLYCQRLPSSRTHGGTESLKGKNTENMGFYGTLKMIFYKMKRKLDHGSEVRSFSLGKKPCKVSEYTSTTGLVPCSATPTTFGDLRAANGQGQQRRRITSVQPPTGLQEWLKMFQSWSGPEKLLALDELIDSCEPTQVKHMMQVIEPQFQRDFISLLPKELALYVLSFLEPKDLLQAAQTCRYWRILAEDNLLWREKCKEEGIDEPLHIKRRKVIKPGFIHSPWKSAYIRQHRIDTNSRRGGSGSQPVLTQSPSVSAAPRQRVTISVSGSNSNIGSNTVNWIQQLPGRAPELLMYDDDLLAPGVSDRFSGSRSGTSASLTISGLQSEDEADYYAATWDDSLNGWVFGGGTKVTVLSG

SEQ ID NO: 529 - protein, 405 aa, synthetic construct
  source 1..405: note = FBXW7b-(GS)2-VL12.3 peptide
CVPRSGLILSCICLYCGVLLPVLLPNLPFLTCLSMSTLESVTYLPEKGLYCQRLPSSRTHGGTESLKGKNTENMGFYGTLKMIFYKMKRKLDHGSEVRSFSLGKKPCKVSEYTSTTGLVPCSATPTTFGDLRAANGQGQQRRRITSVQPPTGLQEWLKMFQSWSGPEKLLALDELIDSCEPTQVKHMMQVIEPQFQRDFISLLPKELALYVLSFLEPKDLLQAAQTCRYWRILAEDNLLWREKCKEEGIDEPLHIKRRKVIKPGFIHSPWKSAYIRQHRIDTNSRRGGSGSGSQPVLTQSPSVSAAPRQRVTISVSGSNSNIGSNTVNWIQQLPGRAPELLMYDDDLLAPGVSDRFSGSRSGTSASLTISGLQSEDEADYYAATWDDSLNGWVFGGGTKVTVLSG

SEQ ID NO: 530 - protein, 407 aa, synthetic construct
  source 1..407: note = FBXW7b-(GS)3-VL12.3 peptide
CVPRSGLILSCICLYCGVLLPVLLPNLPFLTCLSMSTLESVTYLPEKGLYCQRLPSSRTHGGTESLKGKNTENMGFYGTLKMIFYKMKRKLDHGSEVRSFSLGKKPCKVSEYTSTTGLVPCSATPTTFGDLRAANGQGQQRRRITSVQPPTGLQEWLKMFQSWSGPEKLLALDELIDSCEPTQVKHMMQVIEPQFQRDFISLLPKELALYVLSFLEPKDLLQAAQTCRYWRILAEDNLLWREKCKEEGIDEPLHIKRRKVIKPGFIHSPWKSAYIRQHRIDTNSRRGGSGSGSGSQPVLTQSPSVSAAPRQRVTISVSGSNSNIGSNTVNWIQQLPGRAPELLMYDDDLLAPGVSDRFSGSRSGTSASLTISGLQSEDEADYYAATWDDSLNGWVFGGGTKVTVLSG

SEQ ID NO: 531 - protein, 409 aa, synthetic construct
  source 1..409: note = FBXW7b-(GS)4-VL12.3 peptide
CVPRSGLILSCICLYCGVLLPVLLPNLPFLTCLSMSTLESVTYLPEKGLYCQRLPSSRTHGGTESLKGKNTENMGFYGTLKMIFYKMKRKLDHGSEVRSFSLGKKPCKVSEYTSTTGLVPCSATPTTFGDLRAANGQGQQRRRITSVQPPTGLQEWLKMFQSWSGPEKLLALDELIDSCEPTQVKHMMQVIEPQFQRDFISLLPKELALYVLSFLEPKDLLQAAQTCRYWRILAEDNLLWREKCKEEGIDEPLHIKRRKVIKPGFIHSPWKSAYIRQHRIDTNSRRGGSGSGSGSGSQPVLTQSPSVSAAPRQRVTISVSGSNSNIGSNTVNWIQQLPGRAPELLMYDDDLLAPGVSDRFSGSRSGTSASLTISGLQSEDEADYYAATWDDSLNGWVFGGGTKVTVLSG

SEQ ID NO: 532 - protein, 411 aa, synthetic construct
  source 1..411: note = FBXW7b-(GS)5-VL12.3 peptide
CVPRSGLILSCICLYCGVLLPVLLPNLPFLTCLSMSTLESVTYLPEKGLYCQRLPSSRTHGGTESLKGKNTENMGFYGTLKMIFYKMKRKLDHGSEVRSFSLGKKPCKVSEYTSTTGLVPCSATPTTFGDLRAANGQGQQRRRITSVQPPTGLQEWLKMFQSWSGPEKLLALDELIDSCEPTQVKHMMQVIEPQFQRDFISLLPKELALYVLSFLEPKDLLQAAQTCRYWRILAEDNLLWREKCKEEGIDEPLHIKRRKVIKPGFIHSPWKSAYIRQHRIDTNSRRGGSGSGSGSGSGSQPVLTQSPSVSAAPRQRVTISVSGSNSNIGSNTVNWIQQLPGRAPELLMYDDDLLAPGVSDRFSGSRSGTSASLTISGLQSEDEADYYAATWDDSLNGWVFGGGTKVTVLSG

SEQ ID NO: 533 - protein, 413 aa, synthetic construct
  source 1..413: note = FBXW7b-(GS)6-VL12.3 peptide
CVPRSGLILSCICLYCGVLLPVLLPNLPFLTCLSMSTLESVTYLPEKGLYCQRLPSSRTHGGTESLKGKNTENMGFYGTLKMIFYKMKRKLDHGSEVRSFSLGKKPCKVSEYTSTTGLVPCSATPTTFGDLRAANGQGQQRRRITSVQPPTGLQEWLKMFQSWSGPEKLLALDELIDSCEPTQVKHMMQVIEPQFQRDFISLLPKELALYVLSFLEPKDLLQAAQTCRYWRILAEDNLLWREKCKEEGIDEPLHIKRRKVIKPGFIHSPWKSAYIRQHRIDTNSRRGGSGSGSGSGSGSGSQPVLTQSPSVSAAPRQRVTISVSGSNSNIGSNTVNWIQQLPGRAPELLMYDDDLLAPGVSDRFSGSRSGTSASLTISGLQSEDEADYYAATWDDSLNGWVFGGGTKVTVLSG

SEQ ID NO: 534 - protein, 413 aa, synthetic construct
  source 1..413: note = HA-FBXW7b-(GS)1-VL12.3 peptide
MYPYDVPDYACVPRSGLILSCICLYCGVLLPVLLPNLPFLTCLSMSTLESVTYLPEKGLYCQRLPSSRTHGGTESLKGKNTENMGFYGTLKMIFYKMKRKLDHGSEVRSFSLGKKPCKVSEYTSTTGLVPCSATPTTFGDLRAANGQGQQRRRITSVQPPTGLQEWLKMFQSWSGPEKLLALDELIDSCEPTQVKHMMQVIEPQFQRDFISLLPKELALYVLSFLEPKDLLQAAQTCRYWRILAEDNLLWREKCKEEGIDEPLHIKRRKVIKPGFIHSPWKSAYIRQHRIDTNSRRGGSGSQPVLTQSPSVSAAPRQRVTISVSGSNSNIGSNTVNWIQQLPGRAPELLMYDDDLLAPGVSDRFSGSRSGTSASLTISGLQSEDEADYYAATWDDSLNGWVFGGGTKVTVLSG

SEQ ID NO: 535 - protein, 415 aa, synthetic construct
  source 1..415: note = HA-FBXW7b-(GS)2-VL12.3 peptide
MYPYDVPDYACVPRSGLILSCICLYCGVLLPVLLPNLPFLTCLSMSTLESVTYLPEKGLYCQRLPSSRTHGGTESLKGKNTENMGFYGTLKMIFYKMKRKLDHGSEVRSFSLGKKPCKVSEYTSTTGLVPCSATPTTFGDLRAANGQGQQRRRITSVQPPTGLQEWLKMFQSWSGPEKLLALDELIDSCEPTQVKHMMQVIEPQFQRDFISLLPKELALYVLSFLEPKDLLQAAQTCRYWRILAEDNLLWREKCKEEGIDEPLHIKRRKVIKPGFIHSPWKSAYIRQHRIDTNSRRGGSGSGSQPVLTQSPSVSAAPRQRVTISVSGSNSNIGSNTVNWIQQLPGRAPELLMYDDDLLAPGVSDRFSGSRSGTSASLTISGLQSEDEADYYAATWDDSLNGWVFGGGTKVTVLSG

SEQ ID NO: 536 - protein, 417 aa, synthetic construct
  source 1..417: note = HA-FBXW7b-(GS)3-VL12.3 peptide
MYPYDVPDYACVPRSGLILSCICLYCGVLLPVLLPNLPFLTCLSMSTLESVTYLPEKGLYCQRLPSSRTHGGTESLKGKNTENMGFYGTLKMIFYKMKRKLDHGSEVRSFSLGKKPCKVSEYTSTTGLVPCSATPTTFGDLRAANGQGQQRRRITSVQPPTGLQEWLKMFQSWSGPEKLLALDELIDSCEPTQVKHMMQVIEPQFQRDFISLLPKELALYVLSFLEPKDLLQAAQTCRYWRILAEDNLLWREKCKEEGIDEPLHIKRRKVIKPGFIHSPWKSAYIRQHRIDTNSRRGGSGSGSGSQPVLTQSPSVSAAPRQRVTISVSGSNSNIGSNTVNWIQQLPGRAPELLMYDDDLLAPGVSDRFSGSRSGTSASLTISGLQSEDEADYYAATWDDSLNGWVFGGGTKVTVLSG

SEQ ID NO: 537 - protein, 419 aa, synthetic construct
  source 1..419: note = HA-FBXW7b-(GS)4-VL12.3 peptide
MYPYDVPDYACVPRSGLILSCICLYCGVLLPVLLPNLPFLTCLSMSTLESVTYLPEKGLYCQRLPSSRTHGGTESLKGKNTENMGFYGTLKMIFYKMKRKLDHGSEVRSFSLGKKPCKVSEYTSTTGLVPCSATPTTFGDLRAANGQGQQRRRITSVQPPTGLQEWLKMFQSWSGPEKLLALDELIDSCEPTQVKHMMQVIEPQFQRDFISLLPKELALYVLSFLEPKDLLQAAQTCRYWRILAEDNLLWREKCKEEGIDEPLHIKRRKVIKPGFIHSPWKSAYIRQHRIDTNSRRGGSGSGSGSGSQPVLTQSPSVSAAPRQRVTISVSGSNSNIGSNTVNWIQQLPGRAPELLMYDDDLLAPGVSDRFSGSRSGTSASLTISGLQSEDEADYYAATWDDSLNGWVFGGGTKVTVLSG

SEQ ID NO: 538 - protein, 421 aa, synthetic construct
  source 1..421: note = HA-FBXW7b-(GS)5-VL12.3 peptide
MYPYDVPDYACVPRSGLILSCICLYCGVLLPVLLPNLPFLTCLSMSTLESVTYLPEKGLYCQRLPSSRTHGGTESLKGKNTENMGFYGTLKMIFYKMKRKLDHGSEVRSFSLGKKPCKVSEYTSTTGLVPCSATPTTFGDLRAANGQGQQRRRITSVQPPTGLQEWLKMFQSWSGPEKLLALDELIDSCEPTQVKHMMQVIEPQFQRDFISLLPKELALYVLSFLEPKDLLQAAQTCRYWRILAEDNLLWREKCKEEGIDEPLHIKRRKVIKPGFIHSPWKSAYIRQHRIDTNSRRGGSGSGSGSGSGSQPVLTQSPSVSAAPRQRVTISVSGSNSNIGSNTVNWIQQLPGRAPELLMYDDDLLAPGVSDRFSGSRSGTSASLTISGLQSEDEADYYAATWDDSLNGWVFGGGTKVTVLSG

SEQ ID NO: 539 - protein, 423 aa, synthetic construct
  source 1..423: note = HA-FBXW7b-(GS)6-VL12.3 peptide
MYPYDVPDYACVPRSGLILSCICLYCGVLLPVLLPNLPFLTCLSMSTLESVTYLPEKGLYCQRLPSSRTHGGTESLKGKNTENMGFYGTLKMIFYKMKRKLDHGSEVRSFSLGKKPCKVSEYTSTTGLVPCSATPTTFGDLRAANGQGQQRRRITSVQPPTGLQEWLKMFQSWSGPEKLLALDELIDSCEPTQVKHMMQVIEPQFQRDFISLLPKELALYVLSFLEPKDLLQAAQTCRYWRILAEDNLLWREKCKEEGIDEPLHIKRRKVIKPGFIHSPWKSAYIRQHRIDTNSRRGGSGSGSGSGSGSGSQPVLTQSPSVSAAPRQRVTISVSGSNSNIGSNTVNWIQQLPGRAPELLMYDDDLLAPGVSDRFSGSRSGTSASLTISGLQSEDEADYYAATWDDSLNGWVFGGGTKVTVLSG

SEQ ID NO: 540 - protein, 437 aa, synthetic construct
  source 1..437: note = Keap1-(GS)1-VL12.3 peptide
QPDPRPSGAGACCRFLPLQSQCPEGAGDAVMYASTECKAEVTPSQHGNRTFSYTLEDHTKQAFGIMNELRLSQQLCDVTLQVKYQDAPAAQFMAHKVVLASSSPVFKAMFTNGLREQGMEVVSIEGIHPKVMERLIEFAYTASISMGEKCVLHVMNGAVMYQIDSVVRACSDFLVQQLDPSNAIGIANFAEQIGCVELHQRAREYIYMHFGEVAKQEEFFNLSHCQLVTLISRDDLNVRCESEVFHACINWVKYDCEQRRFYVQALLRAVRCHSLTPNFLQMQLQKCEILQSDSRCKDYLVKIFEELTLHKPTQVMPCRAPGSGSQPVLTQSPSVSAAPRQRVTISVSGSNSNIGSNTVNWIQQLPGRAPELLMYDDDLLAPGVSDRFSGSRSGTSASLTISGLQSEDEADYYAATWDDSLNGWVFGGGTKVTVLSG

SEQ ID NO: 541 - protein, 439 aa, synthetic construct
  source 1..439: note = Keap1-(GS)2-VL12.3 peptide
QPDPRPSGAGACCRFLPLQSQCPEGAGDAVMYASTECKAEVTPSQHGNRTFSYTLEDHTKQAFGIMNELRLSQQLCDVTLQVKYQDAPAAQFMAHKVVLASSSPVFKAMFTNGLREQGMEVVSIEGIHPKVMERLIEFAYTASISMGEKCVLHVMNGAVMYQIDSVVRACSDFLVQQLDPSNAIGIANFAEQIGCVELHQRAREYIYMHFGEVAKQEEFFNLSHCQLVTLISRDDLNVRCESEVFHACINWVKYDCEQRRFYVQALLRAVRCHSLTPNFLQMQLQKCEILQSDSRCKDYLVKIFEELTLHKPTQVMPCRAPGSGSGSQPVLTQSPSVSAAPRQRVTISVSGSNSNIGSNTVNWIQQLPGRAPELLMYDDDLLAPGVSDRFSGSRSGTSASLTISGLQSEDEADYYAATWDDSLNGWVFGGGTKVTVLSG

SEQ ID NO: 542 - protein, 441 aa, synthetic construct
  source 1..441: note = Keap1-(GS)3-VL12.3 peptide
QPDPRPSGAGACCRFLPLQSQCPEGAGDAVMYASTECKAEVTPSQHGNRTFSYTLEDHTKQAFGIMNELRLSQQLCDVTLQVKYQDAPAAQFMAHKVVLASSSPVFKAMFTNGLREQGMEVVSIEGIHPKVMERLIEFAYTASISMGEKCVLHVMNGAVMYQIDSVVRACSDFLVQQLDPSNAIGIANFAEQIGCVELHQRAREYIYMHFGEVAKQEEFFNLSHCQLVTLISRDDLNVRCESEVFHACINWVKYDCEQRRFYVQALLRAVRCHSLTPNFLQMQLQKCEILQSDSRCKDYLVKIFEELTLHKPTQVMPCRAPGSGSGSGSQPVLTQSPSVSAAPRQRVTISVSGSNSNIGSNTVNWIQQLPGRAPELLMYDDDLLAPGVSDRFSGSRSGTSASLTISGLQSEDEADYYAATWDDSLNGWVFGGGTKVTVLSG

SEQ ID NO: 543 - protein, 443 aa, synthetic construct
  source 1..443: note = Keap1-(GS)4-VL12.3 peptide
QPDPRPSGAGACCRFLPLQSQCPEGAGDAVMYASTECKAEVTPSQHGNRTFSYTLEDHTKQAFGIMNELRLSQQLCDVTLQVKYQDAPAAQFMAHKVVLASSSPVFKAMFTNGLREQGMEVVSIEGIHPKVMERLIEFAYTASISMGEKCVLHVMNGAVMYQIDSVVRACSDFLVQQLDPSNAIGIANFAEQIGCVELHQRAREYIYMHFGEVAKQEEFFNLSHCQLVTLISRDDLNVRCESEVFHACINWVKYDCEQRRFYVQALLRAVRCHSLTPNFLQMQLQKCEILQSDSRCKDYLVKIFEELTLHKPTQVMPCRAPGSGSGSGSGSQPVLTQSPSVSAAPRQRVTISVSGSNSNIGSNTVNWIQQLPGRAPELLMYDDDLLAPGVSDRFSGSRSGTSASLTISGLQSEDEADYYAATWDDSLNGWVFGGGTKVTVLSG

SEQ ID NO: 544 - protein, 445 aa, synthetic construct
  source 1..445: note = Keap1-(GS)5-VL12.3 peptide
QPDPRPSGAGACCRFLPLQSQCPEGAGDAVMYASTECKAEVTPSQHGNRTFSYTLEDHTKQAFGIMNELRLSQQLCDVTLQVKYQDAPAAQFMAHKVVLASSSPVFKAMFTNGLREQGMEVVSIEGIHPKVMERLIEFAYTASISMGEKCVLHVMNGAVMYQIDSVVRACSDFLVQQLDPSNAIGIANFAEQIGCVELHQRAREYIYMHFGEVAKQEEFFNLSHCQLVTLISRDDLNVRCESEVFHACINWVKYDCEQRRFYVQALLRAVRCHSLTPNFLQMQLQKCEILQSDSRCKDYLVKIFEELTLHKPTQVMPCRAPGSGSGSGSGSGSQPVLTQSPSVSAAPRQRVTISVSGSNSNIGSNTVNWIQQLPGRAPELLMYDDDLLAPGVSDRFSGSRSGTSASLTISGLQSEDEADYYAATWDDSLNGWVFGGGTKVTVLSG

SEQ ID NO: 545 - protein, 447 aa, synthetic construct
  source 1..447: note = Keap1-(GS)6-VL12.3 peptide
QPDPRPSGAGACCRFLPLQSQCPEGAGDAVMYASTECKAEVTPSQHGNRTFSYTLEDHTKQAFGIMNELRLSQQLCDVTLQVKYQDAPAAQFMAHKVVLASSSPVFKAMFTNGLREQGMEVVSIEGIHPKVMERLIEFAYTASISMGEKCVLHVMNGAVMYQIDSVVRACSDFLVQQLDPSNAIGIANFAEQIGCVELHQRAREYIYMHFGEVAKQEEFFNLSHCQLVTLISRDDLNVRCESEVFHACINWVKYDCEQRRFYVQALLRAVRCHSLTPNFLQMQLQKCEILQSDSRCKDYLVKIFEELTLHKPTQVMPCRAPGSGSGSGSGSGSGSQPVLTQSPSVSAAPRQRVTISVSGSNSNIGSNTVNWIQQLPGRAPELLMYDDDLLAPGVSDRFSGSRSGTSASLTISGLQSEDEADYYAATWDDSLNGWVFGGGTKVTVLSG

SEQ ID NO: 546 - protein, 453 aa, synthetic construct
  source 1..453: note = HA-Keap1-(GS)1-VL12.3 peptide
MYPYDVPDYAGSGSGSQPDPRPSGAGACCRFLPLQSQCPEGAGDAVMYASTECKAEVTPSQHGNRTFSYTLEDHTKQAFGIMNELRLSQQLCDVTLQVKYQDAPAAQFMAHKVVLASSSPVFKAMFTNGLREQGMEVVSIEGIHPKVMERLIEFAYTASISMGEKCVLHVMNGAVMYQIDSVVRACSDFLVQQLDPSNAIGIANFAEQIGCVELHQRAREYIYMHFGEVAKQEEFFNLSHCQLVTLISRDDLNVRCESEVFHACINWVKYDCEQRRFYVQALLRAVRCHSLTPNFLQMQLQKCEILQSDSRCKDYLVKIFEELTLHKPTQVMPCRAPGSGSQPVLTQSPSVSAAPRQRVTISVSGSNSNIGSNTVNWIQQLPGRAPELLMYDDDLLAPGVSDRFSGSRSGTSASLTISGLQSEDEADYYAATWDDSLNGWVFGGGTKVTVLSG

SEQ ID NO: 547 - protein, 455 aa, synthetic construct
  source 1..455: note = HA-Keap1-(GS)2-VL12.3 peptide
MYPYDVPDYAGSGSGSQPDPRPSGAGACCRFLPLQSQCPEGAGDAVMYASTECKAEVTPSQHGNRTFSYTLEDHTKQAFGIMNELRLSQQLCDVTLQVKYQDAPAAQFMAHKVVLASSSPVFKAMFTNGLREQGMEVVSIEGIHPKVMERLIEFAYTASISMGEKCVLHVMNGAVMYQIDSVVRACSDFLVQQLDPSNAIGIANFAEQIGCVELHQRAREYIYMHFGEVAKQEEFFNLSHCQLVTLISRDDLNVRCESEVFHACINWVKYDCEQRRFYVQALLRAVRCHSLTPNFLQMQLQKCEILQSDSRCKDYLVKIFEELTLHKPTQVMPCRAPGSGSGSQPVLTQSPSVSAAPRQRVTISVSGSNSNIGSNTVNWIQQLPGRAPELLMYDDDLLAPGVSDRFSGSRSGTSASLTISGLQSEDEADYYAATWDDSLNGWVFGGGTKVTVLSG

SEQ ID NO: 548 - protein, 457 aa, synthetic construct
  source 1..457: note = HA-Keap1-(GS)3-VL12.3 peptide
MYPYDVPDYAGSGSGSQPDPRPSGAGACCRFLPLQSQCPEGAGDAVMYASTECKAEVTPSQHGNRTFSYTLEDHTKQAFGIMNELRLSQQLCDVTLQVKYQDAPAAQFMAHKVVLASSSPVFKAMFTNGLREQGMEVVSIEGIHPKVMERLIEFAYTASISMGEKCVLHVMNGAVMYQIDSVVRACSDFLVQQLDPSNAIGIANFAEQIGCVELHQRAREYIYMHFGEVAKQEEFFNLSHCQLVTLISRDDLNVRCESEVFHACINWVKYDCEQRRFYVQALLRAVRCHSLTPNFLQMQLQKCEILQSDSRCKDYLVKIFEELTLHKPTQVMPCRAPGSGSGSGSQPVLTQSPSVSAAPRQRVTISVSGSNSNIGSNTVNWIQQLPGRAPELLMYDDDLLAPGVSDRFSGSRSGTSASLTISGLQSEDEADYYAATWDDSLNGWVFGGGTKVTVLSG

SEQ ID NO: 549 - protein, 459 aa, synthetic construct
  source 1..459: note = HA-Keap1-(GS)4-VL12.3 peptide
MYPYDVPDYAGSGSGSQPDPRPSGAGACCRFLPLQSQCPEGAGDAVMYASTECKAEVTPSQHGNRTFSYTLEDHTKQAFGIMNELRLSQQLCDVTLQVKYQDAPAAQFMAHKVVLASSSPVFKAMFTNGLREQGMEVVSIEGIHPKVMERLIEFAYTASISMGEKCVLHVMNGAVMYQIDSVVRACSDFLVQQLDPSNAIGIANFAEQIGCVELHQRAREYIYMHFGEVAKQEEFFNLSHCQLVTLISRDDLNVRCESEVFHACINWVKYDCEQRRFYVQALLRAVRCHSLTPNFLQMQLQKCEILQSDSRCKDYLVKIFEELTLHKPTQVMPCRAPGSGSGSGSGSQPVLTQSPSVSAAPRQRVTISVSGSNSNIGSNTVNWIQQLPGRAPELLMYDDDLLAPGVSDRFSGSRSGTSASLTISGLQSEDEADYYAATWDDSLNGWVFGGGTKVTVLSG

SEQ ID NO: 550 - protein, 461 aa, synthetic construct
  source 1..461: note = HA-Keap1-(GS)5-VL12.3 peptide
MYPYDVPDYAGSGSGSQPDPRPSGAGACCRFLPLQSQCPEGAGDAVMYASTECKAEVTPSQHGNRTFSYTLEDHTKQAFGIMNELRLSQQLCDVTLQVKYQDAPAAQFMAHKVVLASSSPVFKAMFTNGLREQGMEVVSIEGIHPKVMERLIEFAYTASISMGEKCVLHVMNGAVMYQIDSVVRACSDFLVQQLDPSNAIGIANFAEQIGCVELHQRAREYIYMHFGEVAKQEEFFNLSHCQLVTLISRDDLNVRCESEVFHACINWVKYDCEQRRFYVQALLRAVRCHSLTPNFLQMQLQKCEILQSDSRCKDYLVKIFEELTLHKPTQVMPCRAPGSGSGSGSGSGSQPVLTQSPSVSAAPRQRVTISVSGSNSNIGSNTVNWIQQLPGRAPELLMYDDDLLAPGVSDRFSGSRSGTSASLTISGLQSEDEADYYAATWDDSLNGWVFGGGTKVTVLSG

SEQ ID NO: 551 - protein, 463 aa, synthetic construct
  source 1..463: note = HA-Keap1-(GS)6-VL12.3 peptide
MYPYDVPDYAGSGSGSQPDPRPSGAGACCRFLPLQSQCPEGAGDAVMYASTECKAEVTPSQHGNRTFSYTLEDHTKQAFGIMNELRLSQQLCDVTLQVKYQDAPAAQFMAHKVVLASSSPVFKAMFTNGLREQGMEVVSIEGIHPKVMERLIEFAYTASISMGEKCVLHVMNGAVMYQIDSVVRACSDFLVQQLDPSNAIGIANFAEQIGCVELHQRAREYIYMHFGEVAKQEEFFNLSHCQLVTLISRDDLNVRCESEVFHACINWVKYDCEQRRFYVQALLRAVRCHSLTPNFLQMQLQKCEILQSDSRCKDYLVKIFEELTLHKPTQVMPCRAPGSGSGSGSGSGSGSQPVLTQSPSVSAAPRQRVTISVSGSNSNIGSNTVNWIQQLPGRAPELLMYDDDLLAPGVSDRFSGSRSGTSASLTISGLQSEDEADYYAATWDDSLNGWVFGGGTKVTVLSG

SEQ ID NO: 552 - protein, 243 aa, synthetic construct
  source 1..243: note = RNF125-(GS)1-VL12.3 peptide
GSVLSTDSGKSAPASATARALERRRDPELPVTSFDCAVCLEVLHQPVRTRCGHVFCRSCIATSLKNNKWTCPYCRAYLPSEGVPATDVAKRMKSEYKNCAECDTLVCLSEMRAHIRTCQKYIDKYGPGSGSQPVLTQSPSVSAAPRQRVTISVSGSNSNIGSNTVNWIQQLPGRAPELLMYDDDLLAPGVSDRFSGSRSGTSASLTISGLQSEDEADYYAATWDDSLNGWVFGGGTKVTVLSG

SEQ ID NO: 553 - protein, 245 aa, synthetic construct
  source 1..245: note = RNF125-(GS)2-VL12.3 peptide
GSVLSTDSGKSAPASATARALERRRDPELPVTSFDCAVCLEVLHQPVRTRCGHVFCRSCIATSLKNNKWTCPYCRAYLPSEGVPATDVAKRMKSEYKNCAECDTLVCLSEMRAHIRTCQKYIDKYGPGSGSGSQPVLTQSPSVSAAPRQRVTISVSGSNSNIGSNTVNWIQQLPGRAPELLMYDDDLLAPGVSDRFSGSRSGTSASLTISGLQSEDEADYYAATWDDSLNGWVFGGGTKVTVLSG

SEQ ID NO: 554 - protein, 247 aa, synthetic construct
  source 1..247: note = RNF125-(GS)3-VL12.3 peptide
GSVLSTDSGKSAPASATARALERRRDPELPVTSFDCAVCLEVLHQPVRTRCGHVFCRSCIATSLKNNKWTCPYCRAYLPSEGVPATDVAKRMKSEYKNCAECDTLVCLSEMRAHIRTCQKYIDKYGPGSGSGSGSQPVLTQSPSVSAAPRQRVTISVSGSNSNIGSNTVNWIQQLPGRAPELLMYDDDLLAPGVSDRFSGSRSGTSASLTISGLQSEDEADYYAATWDDSLNGWVFGGGTKVTVLSG

SEQ ID NO: 555 - protein, 249 aa, synthetic construct
  source 1..249: note = RNF125-(GS)4-VL12.3 peptide
GSVLSTDSGKSAPASATARALERRRDPELPVTSFDCAVCLEVLHQPVRTRCGHVFCRSCIATSLKNNKWTCPYCRAYLPSEGVPATDVAKRMKSEYKNCAECDTLVCLSEMRAHIRTCQKYIDKYGPGSGSGSGSGSQPVLTQSPSVSAAPRQRVTISVSGSNSNIGSNTVNWIQQLPGRAPELLMYDDDLLAPGVSDRFSGSRSGTSASLTISGLQSEDEADYYAATWDDSLNGWVFGGGTKVTVLSG

SEQ ID NO: 556 - protein, 251 aa, synthetic construct
  source 1..251: note = RNF125-(GS)5-VL12.3 peptide
GSVLSTDSGKSAPASATARALERRRDPELPVTSFDCAVCLEVLHQPVRTRCGHVFCRSCIATSLKNNKWTCPYCRAYLPSEGVPATDVAKRMKSEYKNCAECDTLVCLSEMRAHIRTCQKYIDKYGPGSGSGSGSGSGSQPVLTQSPSVSAAPRQRVTISVSGSNSNIGSNTVNWIQQLPGRAPELLMYDDDLLAPGVSDRFSGSRSGTSASLTISGLQSEDEADYYAATWDDSLNGWVFGGGTKVTVLSG

SEQ ID NO: 557 - protein, 253 aa, synthetic construct
  source 1..253: note = RNF125-(GS)6-VL12.3 peptide
GSVLSTDSGKSAPASATARALERRRDPELPVTSFDCAVCLEVLHQPVRTRCGHVFCRSCIATSLKNNKWTCPYCRAYLPSEGVPATDVAKRMKSEYKNCAECDTLVCLSEMRAHIRTCQKYIDKYGPGSGSGSGSGSGSGSQPVLTQSPSVSAAPRQRVTISVSGSNSNIGSNTVNWIQQLPGRAPELLMYDDDLLAPGVSDRFSGSRSGTSASLTISGLQSEDEADYYAATWDDSLNGWVFGGGTKVTVLSG

SEQ ID NO: 558 - protein, 259 aa, synthetic construct
  source 1..259: note = HA-RNF125-(GS)1-VL12.3 peptide
MYPYDVPDYAGSGSGSGSVLSTDSGKSAPASATARALERRRDPELPVTSFDCAVCLEVLHQPVRTRCGHVFCRSCIATSLKNNKWTCPYCRAYLPSEGVPATDVAKRMKSEYKNCAECDTLVCLSEMRAHIRTCQKYIDKYGPGSGSQPVLTQSPSVSAAPRQRVTISVSGSNSNIGSNTVNWIQQLPGRAPELLMYDDDLLAPGVSDRFSGSRSGTSASLTISGLQSEDEADYYAATWDDSLNGWVFGGGTKVTVLSG

SEQ ID NO: 559 - protein, 261 aa, synthetic construct
  source 1..261: note = HA-RNF125-(GS)2-VL12.3 peptide
MYPYDVPDYAGSGSGSGSVLSTDSGKSAPASATARALERRRDPELPVTSFDCAVCLEVLHQPVRTRCGHVFCRSCIATSLKNNKWTCPYCRAYLPSEGVPATDVAKRMKSEYKNCAECDTLVCLSEMRAHIRTCQKYIDKYGPGSGSGSQPVLTQSPSVSAAPRQRVTISVSGSNSNIGSNTVNWIQQLPGRAPELLMYDDDLLAPGVSDRFSGSRSGTSASLTISGLQSEDEADYYAATWDDSLNGWVFGGGTKVTVLSG

SEQ ID NO: 560 - protein, 263 aa, synthetic construct
  source 1..263: note = HA-RNF125-(GS)3-VL12.3 peptide
MYPYDVPDYAGSGSGSGSVLSTDSGKSAPASATARALERRRDPELPVTSFDCAVCLEVLHQPVRTRCGHVFCRSCIATSLKNNKWTCPYCRAYLPSEGVPATDVAKRMKSEYKNCAECDTLVCLSEMRAHIRTCQKYIDKYGPGSGSGSGSQPVLTQSPSVSAAPRQRVTISVSGSNSNIGSNTVNWIQQLPGRAPELLMYDDDLLAPGVSDRFSGSRSGTSASLTISGLQSEDEADYYAATWDDSLNGWVFGGGTKVTVLSG

SEQ ID NO: 561 - protein, 265 aa, synthetic construct
  source 1..265: note = HA-RNF125-(GS)4-VL12.3 peptide
MYPYDVPDYAGSGSGSGSVLSTDSGKSAPASATARALERRRDPELPVTSFDCAVCLEVLHQPVRTRCGHVFCRSCIATSLKNNKWTCPYCRAYLPSEGVPATDVAKRMKSEYKNCAECDTLVCLSEMRAHIRTCQKYIDKYGPGSGSGSGSGSQPVLTQSPSVSAAPRQRVTISVSGSNSNIGSNTVNWIQQLPGRAPELLMYDDDLLAPGVSDRFSGSRSGTSASLTISGLQSEDEADYYAATWDDSLNGWVFGGGTKVTVLSG

SEQ ID NO: 562 - protein, 267 aa, synthetic construct
  source 1..267: note = HA-RNF125-(GS)5-VL12.3 peptide
MYPYDVPDYAGSGSGSGSVLSTDSGKSAPASATARALERRRDPELPVTSFDCAVCLEVLHQPVRTRCGHVFCRSCIATSLKNNKWTCPYCRAYLPSEGVPATDVAKRMKSEYKNCAECDTLVCLSEMRAHIRTCQKYIDKYGPGSGSGSGSGSGSQPVLTQSPSVSAAPRQRVTISVSGSNSNIGSNTVNWIQQLPGRAPELLMYDDDLLAPGVSDRFSGSRSGTSASLTISGLQSEDEADYYAATWDDSLNGWVFGGGTKVTVLSG

SEQ ID NO: 563 - protein, 269 aa, synthetic construct
  source 1..269: note = HA-RNF125-(GS)6-VL12.3 peptide
MYPYDVPDYAGSGSGSGSVLSTDSGKSAPASATARALERRRDPELPVTSFDCAVCLEVLHQPVRTRCGHVFCRSCIATSLKNNKWTCPYCRAYLPSEGVPATDVAKRMKSEYKNCAECDTLVCLSEMRAHIRTCQKYIDKYGPGSGSGSGSGSGSGSQPVLTQSPSVSAAPRQRVTISVSGSNSNIGSNTVNWIQQLPGRAPELLMYDDDLLAPGVSDRFSGSRSGTSASLTISGLQSEDEADYYAATWDDSLNGWVFGGGTKVTVLSG

SEQ ID NO: 564 - protein, 443 aa, synthetic construct
  source 1..443: note = INT41-(GS)1-CHIP-NLS peptide
MAEVQLVVSGGGLVKPGGSMILSCAASGFTFSNYSMNWVRQAPGKGLEWVSSISSSSEYIYYADFVKGRFTISRDNAKNSLYLQMDSLRAEDTAVYYCAWPGYRKAWGRGTLVTVSSGGGGSGGGGSGGGGSQSVLTQPASVSGSPGQSITISCAGTSSDVGGYNYVSWYQQHPGKAPKLMIYEDSKRPSGVSNRFSGSKSGNTASLTISGLRAEDEADYYCSYCASKGHWLFGGGTKLAVLGAAAEQKLISGSRLNFGDDIPSALRIAKKKRWNSIEERRIHQESELHSYLSRLIAAERERELEECQRNHEGDEDDSHVRAQQACIEAKHDKYMADMDELFSQVDEKRKKRDIPDYLCGKISFELMREPCITPSGITYDRKDIEEHLQRVGHFDPVTRSPLTQEQLIPNLAMKEVIDAFISENGWVEDYGSGSPAAKRVKLD

SEQ ID NO: 565 - protein, 445 aa, synthetic construct
  source 1..445: note = INT41-(GS)2-CHIP-NLS peptide
MAEVQLVVSGGGLVKPGGSMILSCAASGFTFSNYSMNWVRQAPGKGLEWVSSISSSSEYIYYADFVKGRFTISRDNAKNSLYLQMDSLRAEDTAVYYCAWPGYRKAWGRGTLVTVSSGGGGSGGGGSGGGGSQSVLTQPASVSGSPGQSITISCAGTSSDVGGYNYVSWYQQHPGKAPKLMIYEDSKRPSGVSNRFSGSKSGNTASLTISGLRAEDEADYYCSYCASKGHWLFGGGTKLAVLGAAAEQKLISGSGSRLNFGDDIPSALRIAKKKRWNSIEERRIHQESELHSYLSRLIAAERERELEECQRNHEGDEDDSHVRAQQACIEAKHDKYMADMDELFSQVDEKRKKRDIPDYLCGKISFELMREPCITPSGITYDRKDIEEHLQRVGHFDPVTRSPLTQEQLIPNLAMKEVIDAFISENGWVEDYGSGSPAAKRVKLD

SEQ ID NO: 566 - protein, 447 aa, synthetic construct
  source 1..447: note = INT41-(GS)3-CHIP-NLS peptide
MAEVQLVVSGGGLVKPGGSMILSCAASGFTFSNYSMNWVRQAPGKGLEWVSSISSSSEYIYYADFVKGRFTISRDNAKNSLYLQMDSLRAEDTAVYYCAWPGYRKAWGRGTLVTVSSGGGGSGGGGSGGGGSQSVLTQPASVSGSPGQSITISCAGTSSDVGGYNYVSWYQQHPGKAPKLMIYEDSKRPSGVSNRFSGSKSGNTASLTISGLRAEDEADYYCSYCASKGHWLFGGGTKLAVLGAAAEQKLISGSGSGSRLNFGDDIPSALRIAKKKRWNSIEERRIHQESELHSYLSRLIAAERERELEECQRNHEGDEDDSHVRAQQACIEAKHDKYMADMDELFSQVDEKRKKRDIPDYLCGKISFELMREPCITPSGITYDRKDIEEHLQRVGHFDPVTRSPLTQEQLIPNLAMKEVIDAFISENGWVEDYGSGSPAAKRVKLD

SEQ ID NO: 567 - protein, 449 aa, synthetic construct
  source 1..449: note = INT41-(GS)4-CHIP-NLS peptide
MAEVQLVVSGGGLVKPGGSMILSCAASGFTFSNYSMNWVRQAPGKGLEWVSSISSSSEYIYYADFVKGRFTISRDNAKNSLYLQMDSLRAEDTAVYYCAWPGYRKAWGRGTLVTVSSGGGGSGGGGSGGGGSQSVLTQPASVSGSPGQSITISCAGTSSDVGGYNYVSWYQQHPGKAPKLMIYEDSKRPSGVSNRFSGSKSGNTASLTISGLRAEDEADYYCSYCASKGHWLFGGGTKLAVLGAAAEQKLISGSGSGSGSRLNFGDDIPSALRIAKKKRWNSIEERRIHQESELHSYLSRLIAAERERELEECQRNHEGDEDDSHVRAQQACIEAKHDKYMADMDELFSQVDEKRKKRDIPDYLCGKISFELMREPCITPSGITYDRKDIEEHLQRVGHFDPVTRSPLTQEQLIPNLAMKEVIDAFISENGWVEDYGSGSPAAKRVKLD

SEQ ID NO: 568 - protein, 451 aa, synthetic construct
  source 1..451: note = INT41-(GS)5-CHIP-NLS peptide
MAEVQLVVSGGGLVKPGGSMILSCAASGFTFSNYSMNWVRQAPGKGLEWVSSISSSSEYIYYADFVKGRFTISRDNAKNSLYLQMDSLRAEDTAVYYCAWPGYRKAWGRGTLVTVSSGGGGSGGGGSGGGGSQSVLTQPASVSGSPGQSITISCAGTSSDVGGYNYVSWYQQHPGKAPKLMIYEDSKRPSGVSNRFSGSKSGNTASLTISGLRAEDEADYYCSYCASKGHWLFGGGTKLAVLGAAAEQKLISGSGSGSGSGSRLNFGDDIPSALRIAKKKRWNSIEERRIHQESELHSYLSRLIAAERERELEECQRNHEGDEDDSHVRAQQACIEAKHDKYMADMDELFSQVDEKRKKRDIPDYLCGKISFELMREPCITPSGITYDRKDIEEHLQRVGHFDPVTRSPLTQEQLIPNLAMKEVIDAFISENGWVEDYGSGSPAAKRVKLD

SEQ ID NO: 569 - protein, 453 aa, synthetic construct
  source 1..453: note = INT41-(GS)6-CHIP-NLS peptide
MAEVQLVVSGGGLVKPGGSMILSCAASGFTFSNYSMNWVRQAPGKGLEWVSSISSSSEYIYYADFVKGRFTISRDNAKNSLYLQMDSLRAEDTAVYYCAWPGYRKAWGRGTLVTVSSGGGGSGGGGSGGGGSQSVLTQPASVSGSPGQSITISCAGTSSDVGGYNYVSWYQQHPGKAPKLMIYEDSKRPSGVSNRFSGSKSGNTASLTISGLRAEDEADYYCSYCASKGHWLFGGGTKLAVLGAAAEQKLISGSGSGSGSGSGSRLNFGDDIPSALRIAKKKRWNSIEERRIHQESELHSYLSRLIAAERERELEECQRNHEGDEDDSHVRAQQACIEAKHDKYMADMDELFSQVDEKRKKRDIPDYLCGKISFELMREPCITPSGITYDRKDIEEHLQRVGHFDPVTRSPLTQEQLIPNLAMKEVIDAFISENGWVEDYGSGSPAAKRVKLD

SEQ ID NO: 570 - protein, 452 aa, synthetic construct
  source 1..452: note = INT41-(GS)1-CHIP-NLS-HA peptide
MAEVQLVVSGGGLVKPGGSMILSCAASGFTFSNYSMNWVRQAPGKGLEWVSSISSSSEYIYYADFVKGRFTISRDNAKNSLYLQMDSLRAEDTAVYYCAWPGYRKAWGRGTLVTVSSGGGGSGGGGSGGGGSQSVLTQPASVSGSPGQSITISCAGTSSDVGGYNYVSWYQQHPGKAPKLMIYEDSKRPSGVSNRFSGSKSGNTASLTISGLRAEDEADYYCSYCASKGHWLFGGGTKLAVLGAAAEQKLISGSRLNFGDDIPSALRIAKKKRWNSIEERRIHQESELHSYLSRLIAAERERELEECQRNHEGDEDDSHVRAQQACIEAKHDKYMADMDELFSQVDEKRKKRDIPDYLCGKISFELMREPCITPSGITYDRKDIEEHLQRVGHFDPVTRSPLTQEQLIPNLAMKEVIDAFISENGWVEDYGSGSPAAKRVKLDYPYDVPDYA

SEQ ID NO: 571 - protein, 454 aa, synthetic construct
  source 1..454: note = INT41-(GS)2-CHIP-NLS-HA peptide
MAEVQLVVSGGGLVKPGGSMILSCAASGFTFSNYSMNWVRQAPGKGLEWVSSISSSSEYIYYADFVKGRFTISRDNAKNSLYLQMDSLRAEDTAVYYCAWPGYRKAWGRGTLVTVSSGGGGSGGGGSGGGGSQSVLTQPASVSGSPGQSITISCAGTSSDVGGYNYVSWYQQHPGKAPKLMIYEDSKRPSGVSNRFSGSKSGNTASLTISGLRAEDEADYYCSYCASKGHWLFGGGTKLAVLGAAAEQKLISGSGSRLNFGDDIPSALRIAKKKRWNSIEERRIHQESELHSYLSRLIAAERERELEECQRNHEGDEDDSHVRAQQACIEAKHDKYMADMDELFSQVDEKRKKRDIPDYLCGKISFELMREPCITPSGITYDRKDIEEHLQRVGHFDPVTRSPLTQEQLIPNLAMKEVIDAFISENGWVEDYGSGSPAAKRVKLDYPYDVPDYA

SEQ ID NO: 572 - protein, 456 aa, synthetic construct
  source 1..456: note = INT41-(GS)3-CHIP-NLS-HA peptide
MAEVQLVVSGGGLVKPGGSMILSCAASGFTFSNYSMNWVRQAPGKGLEWVSSISSSSEYIYYADFVKGRFTISRDNAKNSLYLQMDSLRAEDTAVYYCAWPGYRKAWGRGTLVTVSSGGGGSGGGGSGGGGSQSVLTQPASVSGSPGQSITISCAGTSSDVGGYNYVSWYQQHPGKAPKLMIYEDSKRPSGVSNRFSGSKSGNTASLTISGLRAEDEADYYCSYCASKGHWLFGGGTKLAVLGAAAEQKLISGSGSGSRLNFGDDIPSALRIAKKKRWNSIEERRIHQESELHSYLSRLIAAERERELEECQRNHEGDEDDSHVRAQQACIEAKHDKYMADMDELFSQVDEKRKKRDIPDYLCGKISFELMREPCITPSGITYDRKDIEEHLQRVGHFDPVTRSPLTQEQLIPNLAMKEVIDAFISENGWVEDYGSGSPAAKRVKLDYPYDVPDYA

SEQ ID NO: 573 - protein, 458 aa, synthetic construct
  source 1..458: note = INT41-(GS)4-CHIP-NLS-HA peptide
MAEVQLVVSGGGLVKPGGSMILSCAASGFTFSNYSMNWVRQAPGKGLEWVSSISSSSEYIYYADFVKGRFTISRDNAKNSLYLQMDSLRAEDTAVYYCAWPGYRKAWGRGTLVTVSSGGGGSGGGGSGGGGSQSVLTQPASVSGSPGQSITISCAGTSSDVGGYNYVSWYQQHPGKAPKLMIYEDSKRPSGVSNRFSGSKSGNTASLTISGLRAEDEADYYCSYCASKGHWLFGGGTKLAVLGAAAEQKLISGSGSGSGSRLNFGDDIPSALRIAKKKRWNSIEERRIHQESELHSYLSRLIAAERERELEECQRNHEGDEDDSHVRAQQACIEAKHDKYMADMDELFSQVDEKRKKRDIPDYLCGKISFELMREPCITPSGITYDRKDIEEHLQRVGHFDPVTRSPLTQEQLIPNLAMKEVIDAFISENGWVEDYGSGSPAAKRVKLDYPYDVPDYA

SEQ ID NO: 574 - protein, 460 aa, synthetic construct
  source 1..460: note = INT41-(GS)5-CHIP-NLS-HA peptide
MAEVQLVVSGGGLVKPGGSMILSCAASGFTFSNYSMNWVRQAPGKGLEWVSSISSSSEYIYYADFVKGRFTISRDNAKNSLYLQMDSLRAEDTAVYYCAWPGYRKAWGRGTLVTVSSGGGGSGGGGSGGGGSQSVLTQPASVSGSPGQSITISCAGTSSDVGGYNYVSWYQQHPGKAPKLMIYEDSKRPSGVSNRFSGSKSGNTASLTISGLRAEDEADYYCSYCASKGHWLFGGGTKLAVLGAAAEQKLISGSGSGSGSGSRLNFGDDIPSALRIAKKKRWNSIEERRIHQESELHSYLSRLIAAERERELEECQRNHEGDEDDSHVRAQQACIEAKHDKYMADMDELFSQVDEKRKKRDIPDYLCGKISFELMREPCITPSGITYDRKDIEEHLQRVGHFDPVTRSPLTQEQLIPNLAMKEVIDAFISENGWVEDYGSGSPAAKRVKLDYPYDVPDYA

SEQ ID NO: 575 - protein, 462 aa, synthetic construct
  source 1..462: note = INT41-(GS)6-CHIP-NLS-HA peptide
MAEVQLVVSGGGLVKPGGSMILSCAASGFTFSNYSMNWVRQAPGKGLEWVSSISSSSEYIYYADFVKGRFTISRDNAKNSLYLQMDSLRAEDTAVYYCAWPGYRKAWGRGTLVTVSSGGGGSGGGGSGGGGSQSVLTQPASVSGSPGQSITISCAGTSSDVGGYNYVSWYQQHPGKAPKLMIYEDSKRPSGVSNRFSGSKSGNTASLTISGLRAEDEADYYCSYCASKGHWLFGGGTKLAVLGAAAEQKLISGSGSGSGSGSGSRLNFGDDIPSALRIAKKKRWNSIEERRIHQESELHSYLSRLIAAERERELEECQRNHEGDEDDSHVRAQQACIEAKHDKYMADMDELFSQVDEKRKKRDIPDYLCGKISFELMREPCITPSGITYDRKDIEEHLQRVGHFDPVTRSPLTQEQLIPNLAMKEVIDAFISENGWVEDYGSGSPAAKRVKLDYPYDVPDYA

SEQ ID NO: 576 - protein, 303 aa, synthetic construct
  source 1..303: note = NLS-DCAF1-(GS)1-INT41 peptide
PAAKRVKLDGSGSGSQAPINFTSRLNRRASFPKYGGVDGGCFDRHLIFSRGSAEVQLVVSGGGLVKPGGSMILSCAASGFTFSNYSMNWVRQAPGKGLEWVSSISSSSEYIYYADFVKGRFTISRDNAKNSLYLQMDSLRAEDTAVYYCAWPGYRKAWGRGTLVTVSSGGGGSGGGGSGGGGSQSVLTQPASVSGSPGQSITISCAGTSSDVGGYNYVSWYQQHPGKAPKLMIYEDSKRPSGVSNRFSGSKSGNTASLTISGLRAEDEADYYCSYCASKGHWLFGGGTKLAVLGAAAEQKLIS

SEQ ID NO: 577 - protein, 305 aa, synthetic construct
  source 1..305: note = NLS-DCAF1-(GS)2-INT41 peptide
PAAKRVKLDGSGSGSQAPINFTSRLNRRASFPKYGGVDGGCFDRHLIFSRGSGSAEVQLVVSGGGLVKPGGSMILSCAASGFTFSNYSMNWVRQAPGKGLEWVSSISSSSEYIYYADFVKGRFTISRDNAKNSLYLQMDSLRAEDTAVYYCAWPGYRKAWGRGTLVTVSSGGGGSGGGGSGGGGSQSVLTQPASVSGSPGQSITISCAGTSSDVGGYNYVSWYQQHPGKAPKLMIYEDSKRPSGVSNRFSGSKSGNTASLTISGLRAEDEADYYCSYCASKGHWLFGGGTKLAVLGAAAEQKLIS

SEQ ID NO: 578 - protein, 307 aa, synthetic construct
  source 1..307: note = NLS-DCAF1-(GS)3-INT41 peptide
PAAKRVKLDGSGSGSQAPINFTSRLNRRASFPKYGGVDGGCFDRHLIFSRGSGSGSAEVQLVVSGGGLVKPGGSMILSCAASGFTFSNYSMNWVRQAPGKGLEWVSSISSSSEYIYYADFVKGRFTISRDNAKNSLYLQMDSLRAEDTAVYYCAWPGYRKAWGRGTLVTVSSGGGGSGGGGSGGGGSQSVLTQPASVSGSPGQSITISCAGTSSDVGGYNYVSWYQQHPGKAPKLMIYEDSKRPSGVSNRFSGSKSGNTASLTISGLRAEDEADYYCSYCASKGHWLFGGGTKLAVLGAAAEQKLIS

SEQ ID NO: 579 - protein, 309 aa, synthetic construct
  source 1..309: note = NLS-DCAF1-(GS)4-INT41 peptide
PAAKRVKLDGSGSGSQAPINFTSRLNRRASFPKYGGVDGGCFDRHLIFSRGSGSGSGSAEVQLVVSGGGLVKPGGSMILSCAASGFTFSNYSMNWVRQAPGKGLEWVSSISSSSEYIYYADFVKGRFTISRDNAKNSLYLQMDSLRAEDTAVYYCAWPGYRKAWGRGTLVTVSSGGGGSGGGGSGGGGSQSVLTQPASVSGSPGQSITISCAGTSSDVGGYNYVSWYQQHPGKAPKLMIYEDSKRPSGVSNRFSGSKSGNTASLTISGLRAEDEADYYCSYCASKGHWLFGGGTKLAVLGAAAEQKLIS

SEQ ID NO: 580 - protein, 311 aa, synthetic construct
  source 1..311: note = NLS-DCAF1-(GS)5-INT41 peptide
PAAKRVKLDGSGSGSQAPINFTSRLNRRASFPKYGGVDGGCFDRHLIFSRGSGSGSGSGSAEVQLVVSGGGLVKPGGSMILSCAASGFTFSNYSMNWVRQAPGKGLEWVSSISSSSEYIYYADFVKGRFTISRDNAKNSLYLQMDSLRAEDTAVYYCAWPGYRKAWGRGTLVTVSSGGGGSGGGGSGGGGSQSVLTQPASVSGSPGQSITISCAGTSSDVGGYNYVSWYQQHPGKAPKLMIYEDSKRPSGVSNRFSGSKSGNTASLTISGLRAEDEADYYCSYCASKGHWLFGGGTKLAVLGAAAEQKLIS

SEQ ID NO: 581 - protein, 313 aa, synthetic construct
  source 1..313: note = NLS-DCAF1-(GS)6-INT41 peptide
PAAKRVKLDGSGSGSQAPINFTSRLNRRASFPKYGGVDGGCFDRHLIFSRGSGSGSGSGSGSAEVQLVVSGGGLVKPGGSMILSCAASGFTFSNYSMNWVRQAPGKGLEWVSSISSSSEYIYYADFVKGRFTISRDNAKNSLYLQMDSLRAEDTAVYYCAWPGYRKAWGRGTLVTVSSGGGGSGGGGSGGGGSQSVLTQPASVSGSPGQSITISCAGTSSDVGGYNYVSWYQQHPGKAPKLMIYEDSKRPSGVSNRFSGSKSGNTASLTISGLRAEDEADYYCSYCASKGHWLFGGGTKLAVLGAAAEQKLIS

SEQ ID NO: 582 - protein, 313 aa, synthetic construct
  source 1..313: note = HA-NLS-DCAF1-(GS)1-INT41 peptide
MYPYDVPDYAPAAKRVKLDGSGSGSQAPINFTSRLNRRASFPKYGGVDGGCFDRHLIFSRGSAEVQLVVSGGGLVKPGGSMILSCAASGFTFSNYSMNWVRQAPGKGLEWVSSISSSSEYIYYADFVKGRFTISRDNAKNSLYLQMDSLRAEDTAVYYCAWPGYRKAWGRGTLVTVSSGGGGSGGGGSGGGGSQSVLTQPASVSGSPGQSITISCAGTSSDVGGYNYVSWYQQHPGKAPKLMIYEDSKRPSGVSNRFSGSKSGNTASLTISGLRAEDEADYYCSYCASKGHWLFGGGTKLAVLGAAAEQKLIS

SEQ ID NO: 583 - protein, 315 aa, synthetic construct
  source 1..315: note = HA-NLS-DCAF1-(GS)2-INT41 peptide
MYPYDVPDYAPAAKRVKLDGSGSGSQAPINFTSRLNRRASFPKYGGVDGGCFDRHLIFSRGSGSAEVQLVVSGGGLVKPGGSMILSCAASGFTFSNYSMNWVRQAPGKGLEWVSSISSSSEYIYYADFVKGRFTISRDNAKNSLYLQMDSLRAEDTAVYYCAWPGYRKAWGRGTLVTVSSGGGGSGGGGSGGGGSQSVLTQPASVSGSPGQSITISCAGTSSDVGGYNYVSWYQQHPGKAPKLMIYEDSKRPSGVSNRFSGSKSGNTASLTISGLRAEDEADYYCSYCASKGHWLFGGGTKLAVLGAAAEQKLIS

SEQ ID NO: 584 - protein, 317 aa, synthetic construct
  source 1..317: note = HA-NLS-DCAF1-(GS)3-INT41 peptide
MYPYDVPDYAPAAKRVKLDGSGSGSQAPINFTSRLNRRASFPKYGGVDGGCFDRHLIFSRGSGSGSAEVQLVVSGGGLVKPGGSMILSCAASGFTFSNYSMNWVRQAPGKGLEWVSSISSSSEYIYYADFVKGRFTISRDNAKNSLYLQMDSLRAEDTAVYYCAWPGYRKAWGRGTLVTVSSGGGGSGGGGSGGGGSQSVLTQPASVSGSPGQSITISCAGTSSDVGGYNYVSWYQQHPGKAPKLMIYEDSKRPSGVSNRFSGSKSGNTASLTISGLRAEDEADYYCSYCASKGHWLFGGGTKLAVLGAAAEQKLIS

SEQ ID NO: 585 - protein, 319 aa, synthetic construct
  source 1..319: note = HA-NLS-DCAF1-(GS)4-INT41 peptide
MYPYDVPDYAPAAKRVKLDGSGSGSQAPINFTSRLNRRASFPKYGGVDGGCFDRHLIFSRGSGSGSGSAEVQLVVSGGGLVKPGGSMILSCAASGFTFSNYSMNWVRQAPGKGLEWVSSISSSSEYIYYADFVKGRFTISRDNAKNSLYLQMDSLRAEDTAVYYCAWPGYRKAWGRGTLVTVSSGGGGSGGGGSGGGGSQSVLTQPASVSGSPGQSITISCAGTSSDVGGYNYVSWYQQHPGKAPKLMIYEDSKRPSGVSNRFSGSKSGNTASLTISGLRAEDEADYYCSYCASKGHWLFGGGTKLAVLGAAAEQKLIS

SEQ ID NO: 586 - protein, 321 aa, synthetic construct
  source 1..321: note = HA-NLS-DCAF1-(GS)5-INT41 peptide
MYPYDVPDYAPAAKRVKLDGSGSGSQAPINFTSRLNRRASFPKYGGVDGGCFDRHLIFSRGSGSGSGSGSAEVQLVVSGGGLVKPGGSMILSCAASGFTFSNYSMNWVRQAPGKGLEWVSSISSSSEYIYYADFVKGRFTISRDNAKNSLYLQMDSLRAEDTAVYYCAWPGYRKAWGRGTLVTVSSGGGGSGGGGSGGGGSQSVLTQPASVSGSPGQSITISCAGTSSDVGGYNYVSWYQQHPGKAPKLMIYEDSKRPSGVSNRFSGSKSGNTASLTISGLRAEDEADYYCSYCASKGHWLFGGGTKLAVLGAAAEQKLIS

SEQ ID NO: 587 - protein, 323 aa, synthetic construct
  source 1..323: note = HA-NLS-DCAF1-(GS)6-INT41 peptide
MYPYDVPDYAPAAKRVKLDGSGSGSQAPINFTSRLNRRASFPKYGGVDGGCFDRHLIFSRGSGSGSGSGSGSAEVQLVVSGGGLVKPGGSMILSCAASGFTFSNYSMNWVRQAPGKGLEWVSSISSSSEYIYYADFVKGRFTISRDNAKNSLYLQMDSLRAEDTAVYYCAWPGYRKAWGRGTLVTVSSGGGGSGGGGSGGGGSQSVLTQPASVSGSPGQSITISCAGTSSDVGGYNYVSWYQQHPGKAPKLMIYEDSKRPSGVSNRFSGSKSGNTASLTISGLRAEDEADYYCSYCASKGHWLFGGGTKLAVLGAAAEQKLIS

SEQ ID NO: 588 - protein, 624 aa, synthetic construct
  source 1..624: note = NLS-INT41-(GS)1-E6AP peptide
PAAKRVKLDGSGSGSAEVQLVVSGGGLVKPGGSMILSCAASGFTFSNYSMNWVRQAPGKGLEWVSSISSSSEYIYYADFVKGRFTISRDNAKNSLYLQMDSLRAEDTAVYYCAWPGYRKAWGRGTLVTVSSGGGGSGGGGSGGGGSQSVLTQPASVSGSPGQSITISCAGTSSDVGGYNYVSWYQQHPGKAPKLMIYEDSKRPSGVSNRFSGSKSGNTASLTISGLRAEDEADYYCSYCASKGHWLFGGGTKLAVLGAAAEQKLISGSNPYLRLKVRRDHIIDDALVRLEMIAMENPADLKKQLYVEFEGEQGVDEGGVSKEFFQLVVEEIFNPDIGMFTYDESTKLFWFNPSSFETEGQFTLIGIVLGLAIYNNCILDVHFPMVVYRKLMGKKGTFRDLGDSHPVLYQSLKDLLEYEGNVEDDMMITFQISQTDLFGNPMMYDLKENGDKIPITNENRKEFVNLYSDYILNKSVEKQFKAFRRGFHMVTNESPLKYLFRPEEIELLICGSRNLDFQALEETTEYDGGYTRDSVLIREFWEIVHSFTDEQKRLFLQFTTGTDRAPVGGLGKLKMIIAKNGPDTERLPTSHTCFNVLLLPEYSSKEKLKERLLKAITYAKGFGML

SEQ ID NO: 589 - protein, 626 aa, synthetic construct
  source 1..626: note = NLS-INT41-(GS)2-E6AP peptide
PAAKRVKLDGSGSGSAEVQLVVSGGGLVKPGGSMILSCAASGFTFSNYSMNWVRQAPGKGLEWVSSISSSSEYIYYADFVKGRFTISRDNAKNSLYLQMDSLRAEDTAVYYCAWPGYRKAWGRGTLVTVSSGGGGSGGGGSGGGGSQSVLTQPASVSGSPGQSITISCAGTSSDVGGYNYVSWYQQHPGKAPKLMIYEDSKRPSGVSNRFSGSKSGNTASLTISGLRAEDEADYYCSYCASKGHWLFGGGTKLAVLGAAAEQKLISGSGSNPYLRLKVRRDHIIDDALVRLEMIAMENPADLKKQLYVEFEGEQGVDEGGVSKEFFQLVVEEIFNPDIGMFTYDESTKLFWFNPSSFETEGQFTLIGIVLGLAIYNNCILDVHFPMVVYRKLMGKKGTFRDLGDSHPVLYQSLKDLLEYEGNVEDDMMITFQISQTDLFGNPMMYDLKENGDKIPITNENRKEFVNLYSDYILNKSVEKQFKAFRRGFHMVTNESPLKYLFRPEEIELLICGSRNLDFQALEETTEYDGGYTRDSVLIREFWEIVHSFTDEQKRLFLQFTTGTDRAPVGGLGKLKMIIAKNGPDTERLPTSHTCFNVLLLPEYSSKEKLKERLLKAITYAKGFGML

SEQ ID NO: 590 - protein, 628 aa, synthetic construct
  source 1..628: note = NLS-INT41-(GS)3-E6AP peptide
PAAKRVKLDGSGSGSAEVQLVVSGGGLVKPGGSMILSCAASGFTFSNYSMNWVRQAPGKGLEWVSSISSSSEYIYYADFVKGRFTISRDNAKNSLYLQMDSLRAEDTAVYYCAWPGYRKAWGRGTLVTVSSGGGGSGGGGSGGGGSQSVLTQPASVSGSPGQSITISCAGTSSDVGGYNYVSWYQQHPGKAPKLMIYEDSKRPSGVSNRFSGSKSGNTASLTISGLRAEDEADYYCSYCASKGHWLFGGGTKLAVLGAAAEQKLISGSGSGSNPYLRLKVRRDHIIDDALVRLEMIAMENPADLKKQLYVEFEGEQGVDEGGVSKEFFQLVVEEIFNPDIGMFTYDESTKLFWFNPSSFETEGQFTLIGIVLGLAIYNNCILDVHFPMVVYRKLMGKKGTFRDLGDSHPVLYQSLKDLLEYEGNVEDDMMITFQISQTDLFGNPMMYDLKENGDKIPITNENRKEFVNLYSDYILNKSVEKQFKAFRRGFHMVTNESPLKYLFRPEEIELLICGSRNLDFQALEETTEYDGGYTRDSVLIREFWEIVHSFTDEQKRLFLQFTTGTDRAPVGGLGKLKMIIAKNGPDTERLPTSHTCFNVLLLPEYSSKEKLKERLLKAITYAKGFGML

SEQ ID NO: 591 - protein, 630 aa, synthetic construct
  source 1..630: note = NLS-INT41-(GS)4-E6AP peptide
PAAKRVKLDGSGSGSAEVQLVVSGGGLVKPGGSMILSCAASGFTFSNYSMNWVRQAPGKGLEWVSSISSSSEYIYYADFVKGRFTISRDNAKNSLYLQMDSLRAEDTAVYYCAWPGYRKAWGRGTLVTVSSGGGGSGGGGSGGGGSQSVLTQPASVSGSPGQSITISCAGTSSDVGGYNYVSWYQQHPGKAPKLMIYEDSKRPSGVSNRFSGSKSGNTASLTISGLRAEDEADYYCSYCASKGHWLFGGGTKLAVLGAAAEQKLISGSGSGSGSNPYLRLKVRRDHIIDDALVRLEMIAMENPADLKKQLYVEFEGEQGVDEGGVSKEFFQLVVEEIFNPDIGMFTYDESTKLFWFNPSSFETEGQFTLIGIVLGLAIYNNCILDVHFPMVVYRKLMGKKGTFRDLGDSHPVLYQSLKDLLEYEGNVEDDMMITFQISQTDLFGNPMMYDLKENGDKIPITNENRKEFVNLYSDYILNKSVEKQFKAFRRGFHMVTNESPLKYLFRPEEIELLICGSRNLDFQALEETTEYDGGYTRDSVLIREFWEIVHSFTDEQKRLFLQFTTGTDRAPVGGLGKLKMIIAKNGPDTERLPTSHTCFNVLLLPEYSSKEKLKERLLKAITYAKGFGML

SEQ ID NO: 592 - protein, 632 aa, synthetic construct
  source 1..632: note = NLS-INT41-(GS)5-E6AP peptide
PAAKRVKLDGSGSGSAEVQLVVSGGGLVKPGGSMILSCAASGFTFSNYSMNWVRQAPGKGLEWVSSISSSSEYIYYADFVKGRFTISRDNAKNSLYLQMDSLRAEDTAVYYCAWPGYRKAWGRGTLVTVSSGGGGSGGGGSGGGGSQSVLTQPASVSGSPGQSITISCAGTSSDVGGYNYVSWYQQHPGKAPKLMIYEDSKRPSGVSNRFSGSKSGNTASLTISGLRAEDEADYYCSYCASKGHWLFGGGTKLAVLGAAAEQKLISGSGSGSGSGSNPYLRLKVRRDHIIDDALVRLEMIAMENPADLKKQLYVEFEGEQGVDEGGVSKEFFQLVVEEIFNPDIGMFTYDESTKLFWFNPSSFETEGQFTLIGIVLGLAIYNNCILDVHFPMVVYRKLMGKKGTFRDLGDSHPVLYQSLKDLLEYEGNVEDDMMITFQISQTDLFGNPMMYDLKENGDKIPITNENRKEFVNLYSDYILNKSVEKQFKAFRRGFHMVTNESPLKYLFRPEEIELLICGSRNLDFQALEETTEYDGGYTRDSVLIREFWEIVHSFTDEQKRLFLQFTTGTDRAPVGGLGKLKMIIAKNGPDTERLPTSHTCFNVLLLPEYSSKEKLKERLLKAITYAKGFGML

SEQ ID NO: 593 - protein, 634 aa, synthetic construct
  source 1..634: note = NLS-INT41-(GS)6-E6AP peptide
PAAKRVKLDGSGSGSAEVQLVVSGGGLVKPGGSMILSCAASGFTFSNYSMNWVRQAPGKGLEWVSSISSSSEYIYYADFVKGRFTISRDNAKNSLYLQMDSLRAEDTAVYYCAWPGYRKAWGRGTLVTVSSGGGGSGGGGSGGGGSQSVLTQPASVSGSPGQSITISCAGTSSDVGGYNYVSWYQQHPGKAPKLMIYEDSKRPSGVSNRFSGSKSGNTASLTISGLRAEDEADYYCSYCASKGHWLFGGGTKLAVLGAAAEQKLISGSGSGSGSGSGSNPYLRLKVRRDHIIDDALVRLEMIAMENPADLKKQLYVEFEGEQGVDEGGVSKEFFQLVVEEIFNPDIGMFTYDESTKLFWFNPSSFETEGQFTLIGIVLGLAIYNNCILDVHFPMVVYRKLMGKKGTFRDLGDSHPVLYQSLKDLLEYEGNVEDDMMITFQISQTDLFGNPMMYDLKENGDKIPITNENRKEFVNLYSDYILNKSVEKQFKAFRRGFHMVTNESPLKYLFRPEEIELLICGSRNLDFQALEETTEYDGGYTRDSVLIREFWEIVHSFTDEQKRLFLQFTTGTDRAPVGGLGKLKMIIAKNGPDTERLPTSHTCFNVLLLPEYSSKEKLKERLLKAITYAKGFGML

SEQ ID NO: 594 - protein, 634 aa, synthetic construct
  source 1..634: note = HA-NLS-INT41-(GS)1-E6AP peptide
MYPYDVPDYAPAAKRVKLDGSGSGSAEVQLVVSGGGLVKPGGSMILSCAASGFTFSNYSMNWVRQAPGKGLEWVSSISSSSEYIYYADFVKGRFTISRDNAKNSLYLQMDSLRAEDTAVYYCAWPGYRKAWGRGTLVTVSSGGGGSGGGGSGGGGSQSVLTQPASVSGSPGQSITISCAGTSSDVGGYNYVSWYQQHPGKAPKLMIYEDSKRPSGVSNRFSGSKSGNTASLTISGLRAEDEADYYCSYCASKGHWLFGGGTKLAVLGAAAEQKLISGSNPYLRLKVRRDHIIDDALVRLEMIAMENPADLKKQLYVEFEGEQGVDEGGVSKEFFQLVVEEIFNPDIGMFTYDESTKLFWFNPSSFETEGQFTLIGIVLGLAIYNNCILDVHFPMVVYRKLMGKKGTFRDLGDSHPVLYQSLKDLLEYEGNVEDDMMITFQISQTDLFGNPMMYDLKENGDKIPITNENRKEFVNLYSDYILNKSVEKQFKAFRRGFHMVTNESPLKYLFRPEEIELLICGSRNLDFQALEETTEYDGGYTRDSVLIREFWEIVHSFTDEQKRLFLQFTTGTDRAPVGGLGKLKMIIAKNGPDTERLPTSHTCFNVLLLPEYSSKEKLKERLLKAITYAKGFGML

SEQ ID NO: 595 - protein, 636 aa, synthetic construct
  source 1..636: note = HA-NLS-INT41-(GS)2-E6AP peptide
MYPYDVPDYAPAAKRVKLDGSGSGSAEVQLVVSGGGLVKPGGSMILSCAASGFTFSNYSMNWVRQAPGKGLEWVSSISSSSEYIYYADFVKGRFTISRDNAKNSLYLQMDSLRAEDTAVYYCAWPGYRKAWGRGTLVTVSSGGGGSGGGGSGGGGSQSVLTQPASVSGSPGQSITISCAGTSSDVGGYNYVSWYQQHPGKAPKLMIYEDSKRPSGVSNRFSGSKSGNTASLTISGLRAEDEADYYCSYCASKGHWLFGGGTKLAVLGAAAEQKLISGSGSNPYLRLKVRRDHIIDDALVRLEMIAMENPADLKKQLYVEFEGEQGVDEGGVSKEFFQLVVEEIFNPDIGMFTYDESTKLFWFNPSSFETEGQFTLIGIVLGLAIYNNCILDVHFPMVVYRKLMGKKGTFRDLGDSHPVLYQSLKDLLEYEGNVEDDMMITFQISQTDLFGNPMMYDLKENGDKIPITNENRKEFVNLYSDYILNKSVEKQFKAFRRGFHMVTNESPLKYLFRPEEIELLICGSRNLDFQALEETTEYDGGYTRDSVLIREFWEIVHSFTDEQKRLFLQFTTGTDRAPVGGLGKLKMIIAKNGPDTERLPTSHTCFNVLLLPEYSSKEKLKERLLKAITYAKGFGML

SEQ ID NO: 596 - protein, 638 aa, synthetic construct
  source 1..638: note = HA-NLS-INT41-(GS)3-E6AP peptide
MYPYDVPDYAPAAKRVKLDGSGSGSAEVQLVVSGGGLVKPGGSMILSCAASGFTFSNYSMNWVRQAPGKGLEWVSSISSSSEYIYYADFVKGRFTISRDNAKNSLYLQMDSLRAEDTAVYYCAWPGYRKAWGRGTLVTVSSGGGGSGGGGSGGGGSQSVLTQPASVSGSPGQSITISCAGTSSDVGGYNYVSWYQQHPGKAPKLMIYEDSKRPSGVSNRFSGSKSGNTASLTISGLRAEDEADYYCSYCASKGHWLFGGGTKLAVLGAAAEQKLISGSGSGSNPYLRLKVRRDHIIDDALVRLEMIAMENPADLKKQLYVEFEGEQGVDEGGVSKEFFQLVVEEIFNPDIGMFTYDESTKLFWFNPSSFETEGQFTLIGIVLGLAIYNNCILDVHFPMVVYRKLMGKKGTFRDLGDSHPVLYQSLKDLLEYEGNVEDDMMITFQISQTDLFGNPMMYDLKENGDKIPITNENRKEFVNLYSDYILNKSVEKQFKAFRRGFHMVTNESPLKYLFRPEEIELLICGSRNLDFQALEETTEYDGGYTRDSVLIREFWEIVHSFTDEQKRLFLQFTTGTDRAPVGGLGKLKMIIAKNGPDTERLPTSHTCFNVLLLPEYSSKEKLKERLLKAITYAKGFGML

SEQ ID NO: 597 - protein, 640 aa, synthetic construct
  source 1..640: note = HA-NLS-INT41-(GS)4-E6AP peptide
MYPYDVPDYAPAAKRVKLDGSGSGSAEVQLVVSGGGLVKPGGSMILSCAASGFTFSNYSMNWVRQAPGKGLEWVSSISSSSEYIYYADFVKGRFTISRDNAKNSLYLQMDSLRAEDTAVYYCAWPGYRKAWGRGTLVTVSSGGGGSGGGGSGGGGSQSVLTQPASVSGSPGQSITISCAGTSSDVGGYNYVSWYQQHPGKAPKLMIYEDSKRPSGVSNRFSGSKSGNTASLTISGLRAEDEADYYCSYCASKGHWLFGGGTKLAVLGAAAEQKLISGSGSGSGSNPYLRLKVRRDHIIDDALVRLEMIAMENPADLKKQLYVEFEGEQGVDEGGVSKEFFQLVVEEIFNPDIGMFTYDESTKLFWFNPSSFETEGQFTLIGIVLGLAIYNNCILDVHFPMVVYRKLMGKKGTFRDLGDSHPVLYQSLKDLLEYEGNVEDDMMITFQISQTDLFGNPMMYDLKENGDKIPITNENRKEFVNLYSDYILNKSVEKQFKAFRRGFHMVTNESPLKYLFRPEEIELLICGSRNLDFQALEETTEYDGGYTRDSVLIREFWEIVHSFTDEQKRLFLQFTTGTDRAPVGGLGKLKMIIAKNGPDTERLPTSHTCFNVLLLPEYSSKEKLKERLLKAITYAKGFGML

SEQ ID NO: 598 - protein, 642 aa, synthetic construct
  source 1..642: note = HA-NLS-INT41-(GS)5-E6AP peptide
MYPYDVPDYAPAAKRVKLDGSGSGSAEVQLVVSGGGLVKPGGSMILSCAASGFTFSNYSMNWVRQAPGKGLEWVSSISSSSEYIYYADFVKGRFTISRDNAKNSLYLQMDSLRAEDTAVYYCAWPGYRKAWGRGTLVTVSSGGGGSGGGGSGGGGSQSVLTQPASVSGSPGQSITISCAGTSSDVGGYNYVSWYQQHPGKAPKLMIYEDSKRPSGVSNRFSGSKSGNTASLTISGLRAEDEADYYCSYCASKGHWLFGGGTKLAVLGAAAEQKLISGSGSGSGSGSNPYLRLKVRRDHIIDDALVRLEMIAMENPADLKKQLYVEFEGEQGVDEGGVSKEFFQLVVEEIFNPDIGMFTYDESTKLFWFNPSSFETEGQFTLIGIVLGLAIYNNCILDVHFPMVVYRKLMGKKGTFRDLGDSHPVLYQSLKDLLEYEGNVEDDMMITFQISQTDLFGNPMMYDLKENGDKIPITNENRKEFVNLYSDYILNKSVEKQFKAFRRGFHMVTNESPLKYLFRPEEIELLICGSRNLDFQALEETTEYDGGYTRDSVLIREFWEIVHSFTDEQKRLFLQFTTGTDRAPVGGLGKLKMIIAKNGPDTERLPTSHTCFNVLLLPEYSSKEKLKERLLKAITYAKGFGML

SEQ ID NO: 599 - protein, 644 aa, synthetic construct
  source 1..644: note = HA-NLS-INT41-(GS)6-E6AP peptide
MYPYDVPDYAPAAKRVKLDGSGSGSAEVQLVVSGGGLVKPGGSMILSCAASGFTFSNYSMNWVRQAPGKGLEWVSSISSSSEYIYYADFVKGRFTISRDNAKNSLYLQMDSLRAEDTAVYYCAWPGYRKAWGRGTLVTVSSGGGGSGGGGSGGGGSQSVLTQPASVSGSPGQSITISCAGTSSDVGGYNYVSWYQQHPGKAPKLMIYEDSKRPSGVSNRFSGSKSGNTASLTISGLRAEDEADYYCSYCASKGHWLFGGGTKLAVLGAAAEQKLISGSGSGSGSGSGSNPYLRLKVRRDHIIDDALVRLEMIAMENPADLKKQLYVEFEGEQGVDEGGVSKEFFQLVVEEIFNPDIGMFTYDESTKLFWFNPSSFETEGQFTLIGIVLGLAIYNNCILDVHFPMVVYRKLMGKKGTFRDLGDSHPVLYQSLKDLLEYEGNVEDDMMITFQISQTDLFGNPMMYDLKENGDKIPITNENRKEFVNLYSDYILNKSVEKQFKAFRRGFHMVTNESPLKYLFRPEEIELLICGSRNLDFQALEETTEYDGGYTRDSVLIREFWEIVHSFTDEQKRLFLQFTTGTDRAPVGGLGKLKMIIAKNGPDTERLPTSHTCFNVLLLPEYSSKEKLKERLLKAITYAKGFGML

SEQ ID NO: 600 - protein, 620 aa, synthetic construct
  source 1..620: note = FBXW7a-(GS)1-INT41 peptide
NQELLSVGSKRRRTGGSLRGNPSSSQVDEEQMNRVVEEEQQQQLRQQEEEHTARNGEVVGVEPRPGGQNDSQQGQLEENNNRFISVDEDSSGNQEEQEEDEEHAGEQDEEDEEEEEMDQESDDFDQSDDSSREDEHTHTNSVTNSSSIVDLPVHQLSSPFYTKTTKMKRKLDHGSEVRSFSLGKKPCKVSEYTSTTGLVPCSATPTTFGDLRAANGQGQQRRRITSVQPPTGLQEWLKMFQSWSGPEKLLALDELIDSCEPTQVKHMMQVIEPQFQRDFISLLPKELALYVLSFLEPKDLLQAAQTCRYWRILAEDNLLWREKCKEEGIDEPLHIKRRKVIKPGFIHSPWKSAYIRQHRIDTNSRRGGSAEVQLVVSGGGLVKPGGSMILSCAASGFTFSNYSMNWVRQAPGKGLEWVSSISSSSEYIYYADFVKGRFTISRDNAKNSLYLQMDSLRAEDTAVYYCAWPGYRKAWGRGTLVTVSSGGGGSGGGGSGGGGSQSVLTQPASVSGSPGQSITISCAGTSSDVGGYNYVSWYQQHPGKAPKLMIYEDSKRPSGVSNRFSGSKSGNTASLTISGLRAEDEADYYCSYCASKGHWLFGGGTKLAVLGAAAEQKLIS

SEQ ID NO: 601 - protein, 622 aa, synthetic construct
  source 1..622: note = FBXW7a-(GS)2-INT41 peptide
NQELLSVGSKRRRTGGSLRGNPSSSQVDEEQMNRVVEEEQQQQLRQQEEEHTARNGEVVGVEPRPGGQNDSQQGQLEENNNRFISVDEDSSGNQEEQEEDEEHAGEQDEEDEEEEEMDQESDDFDQSDDSSREDEHTHTNSVTNSSSIVDLPVHQLSSPFYTKTTKMKRKLDHGSEVRSFSLGKKPCKVSEYTSTTGLVPCSATPTTFGDLRAANGQGQQRRRITSVQPPTGLQEWLKMFQSWSGPEKLLALDELIDSCEPTQVKHMMQVIEPQFQRDFISLLPKELALYVLSFLEPKDLLQAAQTCRYWRILAEDNLLWREKCKEEGIDEPLHIKRRKVIKPGFIHSPWKSAYIRQHRIDTNSRRGGSGSAEVQLVVSGGGLVKPGGSMILSCAASGFTFSNYSMNWVRQAPGKGLEWVSSISSSSEYIYYADFVKGRFTISRDNAKNSLYLQMDSLRAEDTAVYYCAWPGYRKAWGRGTLVTVSSGGGGSGGGGSGGGGSQSVLTQPASVSGSPGQSITISCAGTSSDVGGYNYVSWYQQHPGKAPKLMIYEDSKRPSGVSNRFSGSKSGNTASLTISGLRAEDEADYYCSYCASKGHWLFGGGTKLAVLGAAAEQKLIS

SEQ ID NO: 602 - protein, 624 aa, synthetic construct
  source 1..624: note = FBXW7a-(GS)3-INT41 peptide
NQELLSVGSKRRRTGGSLRGNPSSSQVDEEQMNRVVEEEQQQQLRQQEEEHTARNGEVVGVEPRPGGQNDSQQGQLEENNNRFISVDEDSSGNQEEQEEDEEHAGEQDEEDEEEEEMDQESDDFDQSDDSSREDEHTHTNSVTNSSSIVDLPVHQLSSPFYTKTTKMKRKLDHGSEVRSFSLGKKPCKVSEYTSTTGLVPCSATPTTFGDLRAANGQGQQRRRITSVQPPTGLQEWLKMFQSWSGPEKLLALDELIDSCEPTQVKHMMQVIEPQFQRDFISLLPKELALYVLSFLEPKDLLQAAQTCRYWRILAEDNLLWREKCKEEGIDEPLHIKRRKVIKPGFIHSPWKSAYIRQHRIDTNSRRGGSGSGSAEVQLVVSGGGLVKPGGSMILSCAASGFTFSNYSMNWVRQAPGKGLEWVSSISSSSEYIYYADFVKGRFTISRDNAKNSLYLQMDSLRAEDTAVYYCAWPGYRKAWGRGTLVTVSSGGGGSGGGGSGGGGSQSVLTQPASVSGSPGQSITISCAGTSSDVGGYNYVSWYQQHPGKAPKLMIYEDSKRPSGVSNRFSGSKSGNTASLTISGLRAEDEADYYCSYCASKGHWLFGGGTKLAVLGAAAEQKLIS

SEQ ID NO: 603 - protein, 626 aa, synthetic construct
  source 1..626: note = FBXW7a-(GS)4-INT41 peptide
NQELLSVGSKRRRTGGSLRGNPSSSQVDEEQMNRVVEEEQQQQLRQQEEEHTARNGEVVGVEPRPGGQNDSQQGQLEENNNRFISVDEDSSGNQEEQEEDEEHAGEQDEEDEEEEEMDQESDDFDQSDDSSREDEHTHTNSVTNSSSIVDLPVHQLSSPFYTKTTKMKRKLDHGSEVRSFSLGKKPCKVSEYTSTTGLVPCSATPTTFGDLRAANGQGQQRRRITSVQPPTGLQEWLKMFQSWSGPEKLLALDELIDSCEPTQVKHMMQVIEPQFQRDFISLLPKELALYVLSFLEPKDLLQAAQTCRYWRILAEDNLLWREKCKEEGIDEPLHIKRRKVIKPGFIHSPWKSAYIRQHRIDTNSRRGGSGSGSGSAEVQLVVSGGGLVKPGGSMILSCAASGFTFSNYSMNWVRQAPGKGLEWVSSISSSSEYIYYADFVKGRFTISRDNAKNSLYLQMDSLRAEDTAVYYCAWPGYRKAWGRGTLVTVSSGGGGSGGGGSGGGGSQSVLTQPASVSGSPGQSITISCAGTSSDVGGYNYVSWYQQHPGKAPKLMIYEDSKRPSGVSNRFSGSKSGNTASLTISGLRAEDEADYYCSYCASKGHWLFGGGTKLAVLGAAAEQKLIS

SEQ ID NO: 604 - protein, 628 aa, synthetic construct
  source 1..628: note = FBXW7a-(GS)5-INT41 peptide
NQELLSVGSKRRRTGGSLRGNPSSSQVDEEQMNRVVEEEQQQQLRQQEEEHTARNGEVVGVEPRPGGQNDSQQGQLEENNNRFISVDEDSSGNQEEQEEDEEHAGEQDEEDEEEEEMDQESDDFDQSDDSSREDEHTHTNSVTNSSSIVDLPVHQLSSPFYTKTTKMKRKLDHGSEVRSFSLGKKPCKVSEYTSTTGLVPCSATPTTFGDLRAANGQGQQRRRITSVQPPTGLQEWLKMFQSWSGPEKLLALDELIDSCEPTQVKHMMQVIEPQFQRDFISLLPKELALYVLSFLEPKDLLQAAQTCRYWRILAEDNLLWREKCKEEGIDEPLHIKRRKVIKPGFIHSPWKSAYIRQHRIDTNSRRGGSGSGSGSGSAEVQLVVSGGGLVKPGGSMILSCAASGFTFSNYSMNWVRQAPGKGLEWVSSISSSSEYIYYADFVKGRFTISRDNAKNSLYLQMDSLRAEDTAVYYCAWPGYRKAWGRGTLVTVSSGGGGSGGGGSGGGGSQSVLTQPASVSGSPGQSITISCAGTSSDVGGYNYVSWYQQHPGKAPKLMIYEDSKRPSGVSNRFSGSKSGNTASLTISGLRAEDEADYYCSYCASKGHWLFGGGTKLAVLGAAAEQKLIS

SEQ ID NO: 605 - protein, 630 aa, synthetic construct
  source 1..630: note = FBXW7a-(GS)6-INT41 peptide
NQELLSVGSKRRRTGGSLRGNPSSSQVDEEQMNRVVEEEQQQQLRQQEEEHTARNGEVVGVEPRPGGQNDSQQGQLEENNNRFISVDEDSSGNQEEQEEDEEHAGEQDEEDEEEEEMDQESDDFDQSDDSSREDEHTHTNSVTNSSSIVDLPVHQLSSPFYTKTTKMKRKLDHGSEVRSFSLGKKPCKVSEYTSTTGLVPCSATPTTFGDLRAANGQGQQRRRITSVQPPTGLQEWLKMFQSWSGPEKLLALDELIDSCEPTQVKHMMQVIEPQFQRDFISLLPKELALYVLSFLEPKDLLQAAQTCRYWRILAEDNLLWREKCKEEGIDEPLHIKRRKVIKPGFIHSPWKSAYIRQHRIDTNSRRGGSGSGSGSGSGSAEVQLVVSGGGLVKPGGSMILSCAASGFTFSNYSMNWVRQAPGKGLEWVSSISSSSEYIYYADFVKGRFTISRDNAKNSLYLQMDSLRAEDTAVYYCAWPGYRKAWGRGTLVTVSSGGGGSGGGGSGGGGSQSVLTQPASVSGSPGQSITISCAGTSSDVGGYNYVSWYQQHPGKAPKLMIYEDSKRPSGVSNRFSGSKSGNTASLTISGLRAEDEADYYCSYCASKGHWLFGGGTKLAVLGAAAEQKLIS

SEQ ID NO: 606 - protein, 630 aa, synthetic construct
  source 1..630: note = HA-FBXW7a-(GS)1-INT41 peptide
MYPYDVPDYANQELLSVGSKRRRTGGSLRGNPSSSQVDEEQMNRVVEEEQQQQLRQQEEEHTARNGEVVGVEPRPGGQNDSQQGQLEENNNRFISVDEDSSGNQEEQEEDEEHAGEQDEEDEEEEEMDQESDDFDQSDDSSREDEHTHTNSVTNSSSIVDLPVHQLSSPFYTKTTKMKRKLDHGSEVRSFSLGKKPCKVSEYTSTTGLVPCSATPTTFGDLRAANGQGQQRRRITSVQPPTGLQEWLKMFQSWSGPEKLLALDELIDSCEPTQVKHMMQVIEPQFQRDFISLLPKELALYVLSFLEPKDLLQAAQTCRYWRILAEDNLLWREKCKEEGIDEPLHIKRRKVIKPGFIHSPWKSAYIRQHRIDTNSRRGGSAEVQLVVSGGGLVKPGGSMILSCAASGFTFSNYSMNWVRQAPGKGLEWVSSISSSSEYIYYADFVKGRFTISRDNAKNSLYLQMDSLRAEDTAVYYCAWPGYRKAWGRGTLVTVSSGGGGSGGGGSGGGGSQSVLTQPASVSGSPGQSITISCAGTSSDVGGYNYVSWYQQHPGKAPKLMIYEDSKRPSGVSNRFSGSKSGNTASLTISGLRAEDEADYYCSYCASKGHWLFGGGTKLAVLGAAAEQKLIS

SEQ ID NO: 607 - protein, 632 aa, synthetic construct
  source 1..632: note = HA-FBXW7a-(GS)2-INT41 peptide
MYPYDVPDYANQELLSVGSKRRRTGGSLRGNPSSSQVDEEQMNRVVEEEQQQQLRQQEEEHTARNGEVVGVEPRPGGQNDSQQGQLEENNNRFISVDEDSSGNQEEQEEDEEHAGEQDEEDEEEEEMDQESDDFDQSDDSSREDEHTHTNSVTNSSSIVDLPVHQLSSPFYTKTTKMKRKLDHGSEVRSFSLGKKPCKVSEYTSTTGLVPCSATPTTFGDLRAANGQGQQRRRITSVQPPTGLQEWLKMFQSWSGPEKLLALDELIDSCEPTQVKHMMQVIEPQFQRDFISLLPKELALYVLSFLEPKDLLQAAQTCRYWRILAEDNLLWREKCKEEGIDEPLHIKRRKVIKPGFIHSPWKSAYIRQHRIDTNSRRGGSGSAEVQLVVSGGGLVKPGGSMILSCAASGFTFSNYSMNWVRQAPGKGLEWVSSISSSSEYIYYADFVKGRFTISRDNAKNSLYLQMDSLRAEDTAVYYCAWPGYRKAWGRGTLVTVSSGGGGSGGGGSGGGGSQSVLTQPASVSGSPGQSITISCAGTSSDVGGYNYVSWYQQHPGKAPKLMIYEDSKRPSGVSNRFSGSKSGNTASLTISGLRAEDEADYYCSYCASKGHWLFGGGTKLAVLGAAAEQKLIS

SEQ ID NO: 608 - protein, 634 aa, synthetic construct
  source 1..634: note = HA-FBXW7a-(GS)3-INT41 peptide
MYPYDVPDYANQELLSVGSKRRRTGGSLRGNPSSSQVDEEQMNRVVEEEQQQQLRQQEEEHTARNGEVVGVEPRPGGQNDSQQGQLEENNNRFISVDEDSSGNQEEQEEDEEHAGEQDEEDEEEEEMDQESDDFDQSDDSSREDEHTHTNSVTNSSSIVDLPVHQLSSPFYTKTTKMKRKLDHGSEVRSFSLGKKPCKVSEYTSTTGLVPCSATPTTFGDLRAANGQGQQRRRITSVQPPTGLQEWLKMFQSWSGPEKLLALDELIDSCEPTQVKHMMQVIEPQFQRDFISLLPKELALYVLSFLEPKDLLQAAQTCRYWRILAEDNLLWREKCKEEGIDEPLHIKRRKVIKPGFIHSPWKSAYIRQHRIDTNSRRGGSGSGSAEVQLVVSGGGLVKPGGSMILSCAASGFTFSNYSMNWVRQAPGKGLEWVSSISSSSEYIYYADFVKGRFTISRDNAKNSLYLQMDSLRAEDTAVYYCAWPGYRKAWGRGTLVTVSSGGGGSGGGGSGGGGSQSVLTQPASVSGSPGQSITISCAGTSSDVGGYNYVSWYQQHPGKAPKLMIYEDSKRPSGVSNRFSGSKSGNTASLTISGLRAEDEADYYCSYCASKGHWLFGGGTKLAVLGAAAEQKLIS

SEQ ID NO: 609 - protein, 636 aa, synthetic construct
  source 1..636: note = HA-FBXW7a-(GS)4-INT41 peptide
MYPYDVPDYANQELLSVGSKRRRTGGSLRGNPSSSQVDEEQMNRVVEEEQQQQLRQQEEEHTARNGEVVGVEPRPGGQNDSQQGQLEENNNRFISVDEDSSGNQEEQEEDEEHAGEQDEEDEEEEEMDQESDDFDQSDDSSREDEHTHTNSVTNSSSIVDLPVHQLSSPFYTKTTKMKRKLDHGSEVRSFSLGKKPCKVSEYTSTTGLVPCSATPTTFGDLRAANGQGQQRRRITSVQPPTGLQEWLKMFQSWSGPEKLLALDELIDSCEPTQVKHMMQVIEPQFQRDFISLLPKELALYVLSFLEPKDLLQAAQTCRYWRILAEDNLLWREKCKEEGIDEPLHIKRRKVIKPGFIHSPWKSAYIRQHRIDTNSRRGGSGSGSGSAEVQLVVSGGGLVKPGGSMILSCAASGFTFSNYSMNWVRQAPGKGLEWVSSISSSSEYIYYADFVKGRFTISRDNAKNSLYLQMDSLRAEDTAVYYCAWPGYRKAWGRGTLVTVSSGGGGSGGGGSGGGGSQSVLTQPASVSGSPGQSITISCAGTSSDVGGYNYVSWYQQHPGKAPKLMIYEDSKRPSGVSNRFSGSKSGNTASLTISGLRAEDEADYYCSYCASKGHWLFGGGTKLAVLGAAAEQKLIS

SEQ ID NO: 610 - protein, 638 aa, synthetic construct
  source 1..638: note = HA-FBXW7a-(GS)5-INT41 peptide
MYPYDVPDYANQELLSVGSKRRRTGGSLRGNPSSSQVDEEQMNRVVEEEQQQQLRQQEEEHTARNGEVVGVEPRPGGQNDSQQGQLEENNNRFISVDEDSSGNQEEQEEDEEHAGEQDEEDEEEEEMDQESDDFDQSDDSSREDEHTHTNSVTNSSSIVDLPVHQLSSPFYTKTTKMKRKLDHGSEVRSFSLGKKPCKVSEYTSTTGLVPCSATPTTFGDLRAANGQGQQRRRITSVQPPTGLQEWLKMFQSWSGPEKLLALDELIDSCEPTQVKHMMQVIEPQFQRDFISLLPKELALYVLSFLEPKDLLQAAQTCRYWRILAEDNLLWREKCKEEGIDEPLHIKRRKVIKPGFIHSPWKSAYIRQHRIDTNSRRGGSGSGSGSGSAEVQLVVSGGGLVKPGGSMILSCAASGFTFSNYSMNWVRQAPGKGLEWVSSISSSSEYIYYADFVKGRFTISRDNAKNSLYLQMDSLRAEDTAVYYCAWPGYRKAWGRGTLVTVSSGGGGSGGGGSGGGGSQSVLTQPASVSGSPGQSITISCAGTSSDVGGYNYVSWYQQHPGKAPKLMIYEDSKRPSGVSNRFSGSKSGNTASLTISGLRAEDEADYYCSYCASKGHWLFGGGTKLAVLGAAAEQKLIS

SEQ ID NO: 611 - protein, 640 aa, synthetic construct
  source 1..640: note = HA-FBXW7a-(GS)6-INT41 peptide
MYPYDVPDYANQELLSVGSKRRRTGGSLRGNPSSSQVDEEQMNRVVEEEQQQQLRQQEEEHTARNGEVVGVEPRPGGQNDSQQGQLEENNNRFISVDEDSSGNQEEQEEDEEHAGEQDEEDEEEEEMDQESDDFDQSDDSSREDEHTHTNSVTNSSSIVDLPVHQLSSPFYTKTTKMKRKLDHGSEVRSFSLGKKPCKVSEYTSTTGLVPCSATPTTFGDLRAANGQGQQRRRITSVQPPTGLQEWLKMFQSWSGPEKLLALDELIDSCEPTQVKHMMQVIEPQFQRDFISLLPKELALYVLSFLEPKDLLQAAQTCRYWRILAEDNLLWREKCKEEGIDEPLHIKRRKVIKPGFIHSPWKSAYIRQHRIDTNSRRGGSGSGSGSGSGSAEVQLVVSGGGLVKPGGSMILSCAASGFTFSNYSMNWVRQAPGKGLEWVSSISSSSEYIYYADFVKGRFTISRDNAKNSLYLQMDSLRAEDTAVYYCAWPGYRKAWGRGTLVTVSSGGGGSGGGGSGGGGSQSVLTQPASVSGSPGQSITISCAGTSSDVGGYNYVSWYQQHPGKAPKLMIYEDSKRPSGVSNRFSGSKSGNTASLTISGLRAEDEADYYCSYCASKGHWLFGGGTKLAVLGAAAEQKLIS

SEQ ID NO: 612 - protein, 589 aa, synthetic construct
  source 1..589: note = NLS-Keap1-(GS)1-INT41 peptide
PAAKRVKLDGSGSGSQPDPRPSGAGACCRFLPLQSQCPEGAGDAVMYASTECKAEVTPSQHGNRTFSYTLEDHTKQAFGIMNELRLSQQLCDVTLQVKYQDAPAAQFMAHKVVLASSSPVFKAMFTNGLREQGMEVVSIEGIHPKVMERLIEFAYTASISMGEKCVLHVMNGAVMYQIDSVVRACSDFLVQQLDPSNAIGIANFAEQIGCVELHQRAREYIYMHFGEVAKQEEFFNLSHCQLVTLISRDDLNVRCESEVFHACINWVKYDCEQRRFYVQALLRAVRCHSLTPNFLQMQLQKCEILQSDSRCKDYLVKIFEELTLHKPTQVMPCRAPGSAEVQLVVSGGGLVKPGGSMILSCAASGFTFSNYSMNWVRQAPGKGLEWVSSISSSSEYIYYADFVKGRFTISRDNAKNSLYLQMDSLRAEDTAVYYCAWPGYRKAWGRGTLVTVSSGGGGSGGGGSGGGGSQSVLTQPASVSGSPGQSITISCAGTSSDVGGYNYVSWYQQHPGKAPKLMIYEDSKRPSGVSNRFSGSKSGNTASLTISGLRAEDEADYYCSYCASKGHWLFGGGTKLAVLGAAAEQKLIS

SEQ ID NO: 613 - protein, 591 aa, synthetic construct
  source 1..591: note = NLS-Keap1-(GS)2-INT41 peptide
PAAKRVKLDGSGSGSQPDPRPSGAGACCRFLPLQSQCPEGAGDAVMYASTECKAEVTPSQHGNRTFSYTLEDHTKQAFGIMNELRLSQQLCDVTLQVKYQDAPAAQFMAHKVVLASSSPVFKAMFTNGLREQGMEVVSIEGIHPKVMERLIEFAYTASISMGEKCVLHVMNGAVMYQIDSVVRACSDFLVQQLDPSNAIGIANFAEQIGCVELHQRAREYIYMHFGEVAKQEEFFNLSHCQLVTLISRDDLNVRCESEVFHACINWVKYDCEQRRFYVQALLRAVRCHSLTPNFLQMQLQKCEILQSDSRCKDYLVKIFEELTLHKPTQVMPCRAPGSGSAEVQLVVSGGGLVKPGGSMILSCAASGFTFSNYSMNWVRQAPGKGLEWVSSISSSSEYIYYADFVKGRFTISRDNAKNSLYLQMDSLRAEDTAVYYCAWPGYRKAWGRGTLVTVSSGGGGSGGGGSGGGGSQSVLTQPASVSGSPGQSITISCAGTSSDVGGYNYVSWYQQHPGKAPKLMIYEDSKRPSGVSNRFSGSKSGNTASLTISGLRAEDEADYYCSYCASKGHWLFGGGTKLAVLGAAAEQKLIS

SEQ ID NO: 614 - protein, 593 aa, synthetic construct
  source 1..593: note = NLS-Keap1-(GS)3-INT41 peptide
PAAKRVKLDGSGSGSQPDPRPSGAGACCRFLPLQSQCPEGAGDAVMYASTECKAEVTPSQHGNRTFSYTLEDHTKQAFGIMNELRLSQQLCDVTLQVKYQDAPAAQFMAHKVVLASSSPVFKAMFTNGLREQGMEVVSIEGIHPKVMERLIEFAYTASISMGEKCVLHVMNGAVMYQIDSVVRACSDFLVQQLDPSNAIGIANFAEQIGCVELHQRAREYIYMHFGEVAKQEEFFNLSHCQLVTLISRDDLNVRCESEVFHACINWVKYDCEQRRFYVQALLRAVRCHSLTPNFLQMQLQKCEILQSDSRCKDYLVKIFEELTLHKPTQVMPCRAPGSGSGSAEVQLVVSGGGLVKPGGSMILSCAASGFTFSNYSMNWVRQAPGKGLEWVSSISSSSEYIYYADFVKGRFTISRDNAKNSLYLQMDSLRAEDTAVYYCAWPGYRKAWGRGTLVTVSSGGGGSGGGGSGGGGSQSVLTQPASVSGSPGQSITISCAGTSSDVGGYNYVSWYQQHPGKAPKLMIYEDSKRPSGVSNRFSGSKSGNTASLTISGLRAEDEADYYCSYCASKGHWLFGGGTKLAVLGAAAEQKLIS

SEQ ID NO: 615 - protein, 595 aa, synthetic construct
  source 1..595: note = NLS-Keap1-(GS)4-INT41 peptide
PAAKRVKLDGSGSGSQPDPRPSGAGACCRFLPLQSQCPEGAGDAVMYASTECKAEVTPSQHGNRTFSYTLEDHTKQAFGIMNELRLSQQLCDVTLQVKYQDAPAAQFMAHKVVLASSSPVFKAMFTNGLREQGMEVVSIEGIHPKVMERLIEFAYTASISMGEKCVLHVMNGAVMYQIDSVVRACSDFLVQQLDPSNAIGIANFAEQIGCVELHQRAREYIYMHFGEVAKQEEFFNLSHCQLVTLISRDDLNVRCESEVFHACINWVKYDCEQRRFYVQALLRAVRCHSLTPNFLQMQLQKCEILQSDSRCKDYLVKIFEELTLHKPTQVMPCRAPGSGSGSGSAEVQLVVSGGGLVKPGGSMILSCAASGFTFSNYSMNWVRQAPGKGLEWVSSISSSSEYIYYADFVKGRFTISRDNAKNSLYLQMDSLRAEDTAVYYCAWPGYRKAWGRGTLVTVSSGGGGSGGGGSGGGGSQSVLTQPASVSGSPGQSITISCAGTSSDVGGYNYVSWYQQHPGKAPKLMIYEDSKRPSGVSNRFSGSKSGNTASLTISGLRAEDEADYYCSYCASKGHWLFGGGTKLAVLGAAAEQKLIS

SEQ ID NO: 616 - protein, 597 aa, synthetic construct
  source 1..597: note = NLS-Keap1-(GS)5-INT41 peptide
PAAKRVKLDGSGSGSQPDPRPSGAGACCRFLPLQSQCPEGAGDAVMYASTECKAEVTPSQHGNRTFSYTLEDHTKQAFGIMNELRLSQQLCDVTLQVKYQDAPAAQFMAHKVVLASSSPVFKAMFTNGLREQGMEVVSIEGIHPKVMERLIEFAYTASISMGEKCVLHVMNGAVMYQIDSVVRACSDFLVQQLDPSNAIGIANFAEQIGCVELHQRAREYIYMHFGEVAKQEEFFNLSHCQLVTLISRDDLNVRCESEVFHACINWVKYDCEQRRFYVQALLRAVRCHSLTPNFLQMQLQKCEILQSDSRCKDYLVKIFEELTLHKPTQVMPCRAPGSGSGSGSGSAEVQLVVSGGGLVKPGGSMILSCAASGFTFSNYSMNWVRQAPGKGLEWVSSISSSSEYIYYADFVKGRFTISRDNAKNSLYLQMDSLRAEDTAVYYCAWPGYRKAWGRGTLVTVSSGGGGSGGGGSGGGGSQSVLTQPASVSGSPGQSITISCAGTSSDVGGYNYVSWYQQHPGKAPKLMIYEDSKRPSGVSNRFSGSKSGNTASLTISGLRAEDEADYYCSYCASKGHWLFGGGTKLAVLGAAAEQKLIS

SEQ ID NO: 617 - protein, 599 aa, synthetic construct
  source 1..599: note = NLS-Keap1-(GS)6-INT41 peptide
PAAKRVKLDGSGSGSQPDPRPSGAGACCRFLPLQSQCPEGAGDAVMYASTECKAEVTPSQHGNRTFSYTLEDHTKQAFGIMNELRLSQQLCDVTLQVKYQDAPAAQFMAHKVVLASSSPVFKAMFTNGLREQGMEVVSIEGIHPKVMERLIEFAYTASISMGEKCVLHVMNGAVMYQIDSVVRACSDFLVQQLDPSNAIGIANFAEQIGCVELHQRAREYIYMHFGEVAKQEEFFNLSHCQLVTLISRDDLNVRCESEVFHACINWVKYDCEQRRFYVQALLRAVRCHSLTPNFLQMQLQKCEILQSDSRCKDYLVKIFEELTLHKPTQVMPCRAPGSGSGSGSGSGSAEVQLVVSGGGLVKPGGSMILSCAASGFTFSNYSMNWVRQAPGKGLEWVSSISSSSEYIYYADFVKGRFTISRDNAKNSLYLQMDSLRAEDTAVYYCAWPGYRKAWGRGTLVTVSSGGGGSGGGGSGGGGSQSVLTQPASVSGSPGQSITISCAGTSSDVGGYNYVSWYQQHPGKAPKLMIYEDSKRPSGVSNRFSGSKSGNTASLTISGLRAEDEADYYCSYCASKGHWLFGGGTKLAVLGAAAEQKLIS

SEQ ID NO: 618 - protein, 599 aa, synthetic construct
  source 1..599: note = HA-NLS-Keap1-(GS)1-INT41 peptide
MYPYDVPDYAPAAKRVKLDGSGSGSQPDPRPSGAGACCRFLPLQSQCPEGAGDAVMYASTECKAEVTPSQHGNRTFSYTLEDHTKQAFGIMNELRLSQQLCDVTLQVKYQDAPAAQFMAHKVVLASSSPVFKAMFTNGLREQGMEVVSIEGIHPKVMERLIEFAYTASISMGEKCVLHVMNGAVMYQIDSVVRACSDFLVQQLDPSNAIGIANFAEQIGCVELHQRAREYIYMHFGEVAKQEEFFNLSHCQLVTLISRDDLNVRCESEVFHACINWVKYDCEQRRFYVQALLRAVRCHSLTPNFLQMQLQKCEILQSDSRCKDYLVKIFEELTLHKPTQVMPCRAPGSAEVQLVVSGGGLVKPGGSMILSCAASGFTFSNYSMNWVRQAPGKGLEWVSSISSSSEYIYYADFVKGRFTISRDNAKNSLYLQMDSLRAEDTAVYYCAWPGYRKAWGRGTLVTVSSGGGGSGGGGSGGGGSQSVLTQPASVSGSPGQSITISCAGTSSDVGGYNYVSWYQQHPGKAPKLMIYEDSKRPSGVSNRFSGSKSGNTASLTISGLRAEDEADYYCSYCASKGHWLFGGGTKLAVLGAAAEQKLIS

SEQ ID NO: 619 - protein, 601 aa, synthetic construct
  source 1..601: note = HA-NLS-Keap1-(GS)2-INT41 peptide
MYPYDVPDYAPAAKRVKLDGSGSGSQPDPRPSGAGACCRFLPLQSQCPEGAGDAVMYASTECKAEVTPSQHGNRTFSYTLEDHTKQAFGIMNELRLSQQLCDVTLQVKYQDAPAAQFMAHKVVLASSSPVFKAMFTNGLREQGMEVVSIEGIHPKVMERLIEFAYTASISMGEKCVLHVMNGAVMYQIDSVVRACSDFLVQQLDPSNAIGIANFAEQIGCVELHQRAREYIYMHFGEVAKQEEFFNLSHCQLVTLISRDDLNVRCESEVFHACINWVKYDCEQRRFYVQALLRAVRCHSLTPNFLQMQLQKCEILQSDSRCKDYLVKIFEELTLHKPTQVMPCRAPGSGSAEVQLVVSGGGLVKPGGSMILSCAASGFTFSNYSMNWVRQAPGKGLEWVSSISSSSEYIYYADFVKGRFTISRDNAKNSLYLQMDSLRAEDTAVYYCAWPGYRKAWGRGTLVTVSSGGGGSGGGGSGGGGSQSVLTQPASVSGSPGQSITISCAGTSSDVGGYNYVSWYQQHPGKAPKLMIYEDSKRPSGVSNRFSGSKSGNTASLTISGLRAEDEADYYCSYCASKGHWLFGGGTKLAVLGAAAEQKLIS

SEQ ID NO: 620 - protein, 603 aa, synthetic construct
  source 1..603: note = HA-NLS-Keap1-(GS)3-INT41 peptide
MYPYDVPDYAPAAKRVKLDGSGSGSQPDPRPSGAGACCRFLPLQSQCPEGAGDAVMYASTECKAEVTPSQHGNRTFSYTLEDHTKQAFGIMNELRLSQQLCDVTLQVKYQDAPAAQFMAHKVVLASSSPVFKAMFTNGLREQGMEVVSIEGIHPKVMERLIEFAYTASISMGEKCVLHVMNGAVMYQIDSVVRACSDFLVQQLDPSNAIGIANFAEQIGCVELHQRAREYIYMHFGEVAKQEEFFNLSHCQLVTLISRDDLNVRCESEVFHACINWVKYDCEQRRFYVQALLRAVRCHSLTPNFLQMQLQKCEILQSDSRCKDYLVKIFEELTLHKPTQVMPCRAPGSGSGSAEVQLVVSGGGLVKPGGSMILSCAASGFTFSNYSMNWVRQAPGKGLEWVSSISSSSEYIYYADFVKGRFTISRDNAKNSLYLQMDSLRAEDTAVYYCAWPGYRKAWGRGTLVTVSSGGGGSGGGGSGGGGSQSVLTQPASVSGSPGQSITISCAGTSSDVGGYNYVSWYQQHPGKAPKLMIYEDSKRPSGVSNRFSGSKSGNTASLTISGLRAEDEADYYCSYCASKGHWLFGGGTKLAVLGAAAEQKLIS

SEQ ID NO: 621 - protein, 605 aa, synthetic construct
  source 1..605: note = HA-NLS-Keap1-(GS)4-INT41 peptide
MYPYDVPDYAPAAKRVKLDGSGSGSQPDPRPSGAGACCRFLPLQSQCPEGAGDAVMYASTECKAEVTPSQHGNRTFSYTLEDHTKQAFGIMNELRLSQQLCDVTLQVKYQDAPAAQFMAHKVVLASSSPVFKAMFTNGLREQGMEVVSIEGIHPKVMERLIEFAYTASISMGEKCVLHVMNGAVMYQIDSVVRACSDFLVQQLDPSNAIGIANFAEQIGCVELHQRAREYIYMHFGEVAKQEEFFNLSHCQLVTLISRDDLNVRCESEVFHACINWVKYDCEQRRFYVQALLRAVRCHSLTPNFLQMQLQKCEILQSDSRCKDYLVKIFEELTLHKPTQVMPCRAPGSGSGSGSAEVQLVVSGGGLVKPGGSMILSCAASGFTFSNYSMNWVRQAPGKGLEWVSSISSSSEYIYYADFVKGRFTISRDNAKNSLYLQMDSLRAEDTAVYYCAWPGYRKAWGRGTLVTVSSGGGGSGGGGSGGGGSQSVLTQPASVSGSPGQSITISCAGTSSDVGGYNYVSWYQQHPGKAPKLMIYEDSKRPSGVSNRFSGSKSGNTASLTISGLRAEDEADYYCSYCASKGHWLFGGGTKLAVLGAAAEQKLIS

SEQ ID NO: 622 - protein, 607 aa, synthetic construct
  source 1..607: note = HA-NLS-Keap1-(GS)5-INT41 peptide
MYPYDVPDYAPAAKRVKLDGSGSGSQPDPRPSGAGACCRFLPLQSQCPEGAGDAVMYASTECKAEVTPSQHGNRTFSYTLEDHTKQAFGIMNELRLSQQLCDVTLQVKYQDAPAAQFMAHKVVLASSSPVFKAMFTNGLREQGMEVVSIEGIHPKVMERLIEFAYTASISMGEKCVLHVMNGAVMYQIDSVVRACSDFLVQQLDPSNAIGIANFAEQIGCVELHQRAREYIYMHFGEVAKQEEFFNLSHCQLVTLISRDDLNVRCESEVFHACINWVKYDCEQRRFYVQALLRAVRCHSLTPNFLQMQLQKCEILQSDSRCKDYLVKIFEELTLHKPTQVMPCRAPGSGSGSGSGSAEVQLVVSGGGLVKPGGSMILSCAASGFTFSNYSMNWVRQAPGKGLEWVSSISSSSEYIYYADFVKGRFTISRDNAKNSLYLQMDSLRAEDTAVYYCAWPGYRKAWGRGTLVTVSSGGGGSGGGGSGGGGSQSVLTQPASVSGSPGQSITISCAGTSSDVGGYNYVSWYQQHPGKAPKLMIYEDSKRPSGVSNRFSGSKSGNTASLTISGLRAEDEADYYCSYCASKGHWLFGGGTKLAVLGAAAEQKLIS

SEQ ID NO: 623 - protein, 609 aa, synthetic construct
  source 1..609: note = HA-NLS-Keap1-(GS)6-INT41 peptide
MYPYDVPDYAPAAKRVKLDGSGSGSQPDPRPSGAGACCRFLPLQSQCPEGAGDAVMYASTECKAEVTPSQHGNRTFSYTLEDHTKQAFGIMNELRLSQQLCDVTLQVKYQDAPAAQFMAHKVVLASSSPVFKAMFTNGLREQGMEVVSIEGIHPKVMERLIEFAYTASISMGEKCVLHVMNGAVMYQIDSVVRACSDFLVQQLDPSNAIGIANFAEQIGCVELHQRAREYIYMHFGEVAKQEEFFNLSHCQLVTLISRDDLNVRCESEVFHACINWVKYDCEQRRFYVQALLRAVRCHSLTPNFLQMQLQKCEILQSDSRCKDYLVKIFEELTLHKPTQVMPCRAPGSGSGSGSGSGSAEVQLVVSGGGLVKPGGSMILSCAASGFTFSNYSMNWVRQAPGKGLEWVSSISSSSEYIYYADFVKGRFTISRDNAKNSLYLQMDSLRAEDTAVYYCAWPGYRKAWGRGTLVTVSSGGGGSGGGGSGGGGSQSVLTQPASVSGSPGQSITISCAGTSSDVGGYNYVSWYQQHPGKAPKLMIYEDSKRPSGVSNRFSGSKSGNTASLTISGLRAEDEADYYCSYCASKGHWLFGGGTKLAVLGAAAEQKLIS

SEQ ID NO: 624 - protein, 395 aa, synthetic construct
  source 1..395: note = NLS-RNF125-(GS)1-INT41 peptide
PAAKRVKLDGSGSGSGSVLSTDSGKSAPASATARALERRRDPELPVTSFDCAVCLEVLHQPVRTRCGHVFCRSCIATSLKNNKWTCPYCRAYLPSEGVPATDVAKRMKSEYKNCAECDTLVCLSEMRAHIRTCQKYIDKYGPGSAEVQLVVSGGGLVKPGGSMILSCAASGFTFSNYSMNWVRQAPGKGLEWVSSISSSSEYIYYADFVKGRFTISRDNAKNSLYLQMDSLRAEDTAVYYCAWPGYRKAWGRGTLVTVSSGGGGSGGGGSGGGGSQSVLTQPASVSGSPGQSITISCAGTSSDVGGYNYVSWYQQHPGKAPKLMIYEDSKRPSGVSNRFSGSKSGNTASLTISGLRAEDEADYYCSYCASKGHWLFGGGTKLAVLGAAAEQKLIS

SEQ ID NO: 625 - protein, 397 aa, synthetic construct
  source 1..397: note = NLS-RNF125-(GS)2-INT41 peptide
PAAKRVKLDGSGSGSGSVLSTDSGKSAPASATARALERRRDPELPVTSFDCAVCLEVLHQPVRTRCGHVFCRSCIATSLKNNKWTCPYCRAYLPSEGVPATDVAKRMKSEYKNCAECDTLVCLSEMRAHIRTCQKYIDKYGPGSGSAEVQLVVSGGGLVKPGGSMILSCAASGFTFSNYSMNWVRQAPGKGLEWVSSISSSSEYIYYADFVKGRFTISRDNAKNSLYLQMDSLRAEDTAVYYCAWPGYRKAWGRGTLVTVSSGGGGSGGGGSGGGGSQSVLTQPASVSGSPGQSITISCAGTSSDVGGYNYVSWYQQHPGKAPKLMIYEDSKRPSGVSNRFSGSKSGNTASLTISGLRAEDEADYYCSYCASKGHWLFGGGTKLAVLGAAAEQKLIS

SEQ ID NO: 626 - protein, 399 aa, synthetic construct
  source 1..399: note = NLS-RNF125-(GS)3-INT41 peptide
PAAKRVKLDGSGSGSGSVLSTDSGKSAPASATARALERRRDPELPVTSFDCAVCLEVLHQPVRTRCGHVFCRSCIATSLKNNKWTCPYCRAYLPSEGVPATDVAKRMKSEYKNCAECDTLVCLSEMRAHIRTCQKYIDKYGPGSGSGSAEVQLVVSGGGLVKPGGSMILSCAASGFTFSNYSMNWVRQAPGKGLEWVSSISSSSEYIYYADFVKGRFTISRDNAKNSLYLQMDSLRAEDTAVYYCAWPGYRKAWGRGTLVTVSSGGGGSGGGGSGGGGSQSVLTQPASVSGSPGQSITISCAGTSSDVGGYNYVSWYQQHPGKAPKLMIYEDSKRPSGVSNRFSGSKSGNTASLTISGLRAEDEADYYCSYCASKGHWLFGGGTKLAVLGAAAEQKLIS

SEQ ID NO: 627 - protein, 401 aa, synthetic construct
  source 1..401: note = NLS-RNF125-(GS)4-INT41 peptide
PAAKRVKLDGSGSGSGSVLSTDSGKSAPASATARALERRRDPELPVTSFDCAVCLEVLHQPVRTRCGHVFCRSCIATSLKNNKWTCPYCRAYLPSEGVPATDVAKRMKSEYKNCAECDTLVCLSEMRAHIRTCQKYIDKYGPGSGSGSGSAEVQLVVSGGGLVKPGGSMILSCAASGFTFSNYSMNWVRQAPGKGLEWVSSISSSSEYIYYADFVKGRFTISRDNAKNSLYLQMDSLRAEDTAVYYCAWPGYRKAWGRGTLVTVSSGGGGSGGGGSGGGGSQSVLTQPASVSGSPGQSITISCAGTSSDVGGYNYVSWYQQHPGKAPKLMIYEDSKRPSGVSNRFSGSKSGNTASLTISGLRAEDEADYYCSYCASKGHWLFGGGTKLAVLGAAAEQKLIS

SEQ ID NO: 628 - protein, 403 aa, synthetic construct
  source 1..403: note = NLS-RNF125-(GS)5-INT41 peptide
PAAKRVKLDGSGSGSGSVLSTDSGKSAPASATARALERRRDPELPVTSFDCAVCLEVLHQPVRTRCGHVFCRSCIATSLKNNKWTCPYCRAYLPSEGVPATDVAKRMKSEYKNCAECDTLVCLSEMRAHIRTCQKYIDKYGPGSGSGSGSGSAEVQLVVSGGGLVKPGGSMILSCAASGFTFSNYSMNWVRQAPGKGLEWVSSISSSSEYIYYADFVKGRFTISRDNAKNSLYLQMDSLRAEDTAVYYCAWPGYRKAWGRGTLVTVSSGGGGSGGGGSGGGGSQSVLTQPASVSGSPGQSITISCAGTSSDVGGYNYVSWYQQHPGKAPKLMIYEDSKRPSGVSNRFSGSKSGNTASLTISGLRAEDEADYYCSYCASKGHWLFGGGTKLAVLGAAAEQKLIS

SEQ ID NO: 629 - protein, 405 aa, synthetic construct
  source 1..405: note = NLS-RNF125-(GS)6-INT41 peptide
PAAKRVKLDGSGSGSGSVLSTDSGKSAPASATARALERRRDPELPVTSFDCAVCLEVLHQPVRTRCGHVFCRSCIATSLKNNKWTCPYCRAYLPSEGVPATDVAKRMKSEYKNCAECDTLVCLSEMRAHIRTCQKYIDKYGPGSGSGSGSGSGSAEVQLVVSGGGLVKPGGSMILSCAASGFTFSNYSMNWVRQAPGKGLEWVSSISSSSEYIYYADFVKGRFTISRDNAKNSLYLQMDSLRAEDTAVYYCAWPGYRKAWGRGTLVTVSSGGGGSGGGGSGGGGSQSVLTQPASVSGSPGQSITISCAGTSSDVGGYNYVSWYQQHPGKAPKLMIYEDSKRPSGVSNRFSGSKSGNTASLTISGLRAEDEADYYCSYCASKGHWLFGGGTKLAVLGAAAEQKLIS

SEQ ID NO: 630 - protein, 405 aa, synthetic construct
  source 1..405: note = HA-NLS-RNF125-(GS)1-INT41 peptide
MYPYDVPDYAPAAKRVKLDGSGSGSGSVLSTDSGKSAPASATARALERRRDPELPVTSFDCAVCLEVLHQPVRTRCGHVFCRSCIATSLKNNKWTCPYCRAYLPSEGVPATDVAKRMKSEYKNCAECDTLVCLSEMRAHIRTCQKYIDKYGPGSAEVQLVVSGGGLVKPGGSMILSCAASGFTFSNYSMNWVRQAPGKGLEWVSSISSSSEYIYYADFVKGRFTISRDNAKNSLYLQMDSLRAEDTAVYYCAWPGYRKAWGRGTLVTVSSGGGGSGGGGSGGGGSQSVLTQPASVSGSPGQSITISCAGTSSDVGGYNYVSWYQQHPGKAPKLMIYEDSKRPSGVSNRFSGSKSGNTASLTISGLRAEDEADYYCSYCASKGHWLFGGGTKLAVLGAAAEQKLIS

SEQ ID NO: 631 - protein, 407 aa, synthetic construct
  source 1..407: note = HA-NLS-RNF125-(GS)2-INT41 peptide
MYPYDVPDYAPAAKRVKLDGSGSGSGSVLSTDSGKSAPASATARALERRRDPELPVTSFDCAVCLEVLHQPVRTRCGHVFCRSCIATSLKNNKWTCPYCRAYLPSEGVPATDVAKRMKSEYKNCAECDTLVCLSEMRAHIRTCQKYIDKYGPGSGSAEVQLVVSGGGLVKPGGSMILSCAASGFTFSNYSMNWVRQAPGKGLEWVSSISSSSEYIYYADFVKGRFTISRDNAKNSLYLQMDSLRAEDTAVYYCAWPGYRKAWGRGTLVTVSSGGGGSGGGGSGGGGSQSVLTQPASVSGSPGQSITISCAGTSSDVGGYNYVSWYQQHPGKAPKLMIYEDSKRPSGVSNRFSGSKSGNTASLTISGLRAEDEADYYCSYCASKGHWLFGGGTKLAVLGAAAEQKLIS

SEQ ID NO: 632 - protein, 409 aa, synthetic construct
  source 1..409: note = HA-NLS-RNF125-(GS)3-INT41 peptide
MYPYDVPDYAPAAKRVKLDGSGSGSGSVLSTDSGKSAPASATARALERRRDPELPVTSFDCAVCLEVLHQPVRTRCGHVFCRSCIATSLKNNKWTCPYCRAYLPSEGVPATDVAKRMKSEYKNCAECDTLVCLSEMRAHIRTCQKYIDKYGPGSGSGSAEVQLVVSGGGLVKPGGSMILSCAASGFTFSNYSMNWVRQAPGKGLEWVSSISSSSEYIYYADFVKGRFTISRDNAKNSLYLQMDSLRAEDTAVYYCAWPGYRKAWGRGTLVTVSSGGGGSGGGGSGGGGSQSVLTQPASVSGSPGQSITISCAGTSSDVGGYNYVSWYQQHPGKAPKLMIYEDSKRPSGVSNRFSGSKSGNTASLTISGLRAEDEADYYCSYCASKGHWLFGGGTKLAVLGAAAEQKLIS

SEQ ID NO: 633 - protein, 411 aa, synthetic construct
  source 1..411: note = HA-NLS-RNF125-(GS)4-INT41 peptide
MYPYDVPDYAPAAKRVKLDGSGSGSGSVLSTDSGKSAPASATARALERRRDPELPVTSFDCAVCLEVLHQPVRTRCGHVFCRSCIATSLKNNKWTCPYCRAYLPSEGVPATDVAKRMKSEYKNCAECDTLVCLSEMRAHIRTCQKYIDKYGPGSGSGSGSAEVQLVVSGGGLVKPGGSMILSCAASGFTFSNYSMNWVRQAPGKGLEWVSSISSSSEYIYYADFVKGRFTISRDNAKNSLYLQMDSLRAEDTAVYYCAWPGYRKAWGRGTLVTVSSGGGGSGGGGSGGGGSQSVLTQPASVSGSPGQSITISCAGTSSDVGGYNYVSWYQQHPGKAPKLMIYEDSKRPSGVSNRFSGSKSGNTASLTISGLRAEDEADYYCSYCASKGHWLFGGGTKLAVLGAAAEQKLIS

SEQ ID NO: 634 - protein, 413 aa, synthetic construct
  source 1..413: note = HA-NLS-RNF125-(GS)5-INT41 peptide
MYPYDVPDYAPAAKRVKLDGSGSGSGSVLSTDSGKSAPASATARALERRRDPELPVTSFDCAVCLEVLHQPVRTRCGHVFCRSCIATSLKNNKWTCPYCRAYLPSEGVPATDVAKRMKSEYKNCAECDTLVCLSEMRAHIRTCQKYIDKYGPGSGSGSGSGSAEVQLVVSGGGLVKPGGSMILSCAASGFTFSNYSMNWVRQAPGKGLEWVSSISSSSEYIYYADFVKGRFTISRDNAKNSLYLQMDSLRAEDTAVYYCAWPGYRKAWGRGTLVTVSSGGGGSGGGGSGGGGSQSVLTQPASVSGSPGQSITISCAGTSSDVGGYNYVSWYQQHPGKAPKLMIYEDSKRPSGVSNRFSGSKSGNTASLTISGLRAEDEADYYCSYCASKGHWLFGGGTKLAVLGAAAEQKLIS

SEQ ID NO: 635 - protein, 415 aa, synthetic construct
  source 1..415: note = HA-NLS-RNF125-(GS)6-INT41 peptide
MYPYDVPDYAPAAKRVKLDGSGSGSGSVLSTDSGKSAPASATARALERRRDPELPVTSFDCAVCLEVLHQPVRTRCGHVFCRSCIATSLKNNKWTCPYCRAYLPSEGVPATDVAKRMKSEYKNCAECDTLVCLSEMRAHIRTCQKYIDKYGPGSGSGSGSGSGSAEVQLVVSGGGLVKPGGSMILSCAASGFTFSNYSMNWVRQAPGKGLEWVSSISSSSEYIYYADFVKGRFTISRDNAKNSLYLQMDSLRAEDTAVYYCAWPGYRKAWGRGTLVTVSSGGGGSGGGGSGGGGSQSVLTQPASVSGSPGQSITISCAGTSSDVGGYNYVSWYQQHPGKAPKLMIYEDSKRPSGVSNRFSGSKSGNTASLTISGLRAEDEADYYCSYCASKGHWLFGGGTKLAVLGAAAEQKLIS

SEQ ID NO: 636 - protein, 495 aa, synthetic construct
  source 1..495: note = INT41-(GS)1-SPOP-NLS peptide
MAEVQLVVSGGGLVKPGGSMILSCAASGFTFSNYSMNWVRQAPGKGLEWVSSISSSSEYIYYADFVKGRFTISRDNAKNSLYLQMDSLRAEDTAVYYCAWPGYRKAWGRGTLVTVSSGGGGSGGGGSGGGGSQSVLTQPASVSGSPGQSITISCAGTSSDVGGYNYVSWYQQHPGKAPKLMIYEDSKRPSGVSNRFSGSKSGNTASLTISGLRAEDEADYYCSYCASKGHWLFGGGTKLAVLGAAAEQKLISGSNGLLPDDKLTLFCEVSVVQDSVNISGQNTMNMVKVPECRLADELGGLWENSRFTDCCLCVAGQEFQAHKAILAARSPVFSAMFEHEMEESKKNRVEINDVEPEVFKEMMCFIYTGKAPNLDKMADDLLAAADKYALERLKVMCEDALCSNLSVENAAEILILADLHSADQLKTQAVDFINYHASDVLETSGWKSMVVSHPHLVAEAYRSLASAQCPFLGPPRKRLKQSGSGSPAAKRVKLD

SEQ ID NO: 637 - protein, 497 aa, synthetic construct
  source 1..497: note = INT41-(GS)2-SPOP-NLS peptide
MAEVQLVVSGGGLVKPGGSMILSCAASGFTFSNYSMNWVRQAPGKGLEWVSSISSSSEYIYYADFVKGRFTISRDNAKNSLYLQMDSLRAEDTAVYYCAWPGYRKAWGRGTLVTVSSGGGGSGGGGSGGGGSQSVLTQPASVSGSPGQSITISCAGTSSDVGGYNYVSWYQQHPGKAPKLMIYEDSKRPSGVSNRFSGSKSGNTASLTISGLRAEDEADYYCSYCASKGHWLFGGGTKLAVLGAAAEQKLISGSGSNGLLPDDKLTLFCEVSVVQDSVNISGQNTMNMVKVPECRLADELGGLWENSRFTDCCLCVAGQEFQAHKAILAARSPVFSAMFEHEMEESKKNRVEINDVEPEVFKEMMCFIYTGKAPNLDKMADDLLAAADKYALERLKVMCEDALCSNLSVENAAEILILADLHSADQLKTQAVDFINYHASDVLETSGWKSMVVSHPHLVAEAYRSLASAQCPFLGPPRKRLKQSGSGSPAAKRVKLD

SEQ ID NO: 638 - protein, 499 aa, synthetic construct
  source 1..499: note = INT41-(GS)3-SPOP-NLS peptide
MAEVQLVVSGGGLVKPGGSMILSCAASGFTFSNYSMNWVRQAPGKGLEWVSSISSSSEYIYYADFVKGRFTISRDNAKNSLYLQMDSLRAEDTAVYYCAWPGYRKAWGRGTLVTVSSGGGGSGGGGSGGGGSQSVLTQPASVSGSPGQSITISCAGTSSDVGGYNYVSWYQQHPGKAPKLMIYEDSKRPSGVSNRFSGSKSGNTASLTISGLRAEDEADYYCSYCASKGHWLFGGGTKLAVLGAAAEQKLISGSGSGSNGLLPDDKLTLFCEVSVVQDSVNISGQNTMNMVKVPECRLADELGGLWENSRFTDCCLCVAGQEFQAHKAILAARSPVFSAMFEHEMEESKKNRVEINDVEPEVFKEMMCFIYTGKAPNLDKMADDLLAAADKYALERLKVMCEDALCSNLSVENAAEILILADLHSADQLKTQAVDFINYHASDVLETSGWKSMVVSHPHLVAEAYRSLASAQCPFLGPPRKRLKQSGSGSPAAKRVKLD

SEQ ID NO: 639 - protein, 501 aa, synthetic construct
  source 1..501: note = INT41-(GS)4-SPOP-NLS peptide
MAEVQLVVSGGGLVKPGGSMILSCAASGFTFSNYSMNWVRQAPGKGLEWVSSISSSSEYIYYADFVKGRFTISRDNAKNSLYLQMDSLRAEDTAVYYCAWPGYRKAWGRGTLVTVSSGGGGSGGGGSGGGGSQSVLTQPASVSGSPGQSITISCAGTSSDVGGYNYVSWYQQHPGKAPKLMIYEDSKRPSGVSNRFSGSKSGNTASLTISGLRAEDEADYYCSYCASKGHWLFGGGTKLAVLGAAAEQKLISGSGSGSGSNGLLPDDKLTLFCEVSVVQDSVNISGQNTMNMVKVPECRLADELGGLWENSRFTDCCLCVAGQEFQAHKAILAARSPVFSAMFEHEMEESKKNRVEINDVEPEVFKEMMCFIYTGKAPNLDKMADDLLAAADKYALERLKVMCEDALCSNLSVENAAEILILADLHSADQLKTQAVDFINYHASDVLETSGWKSMVVSHPHLVAEAYRSLASAQCPFLGPPRKRLKQSGSGSPAAKRVKLD

SEQ ID NO: 640 - protein, 504 aa, synthetic construct
  source 1..504: note = INT41-(GS)5-SPOP-NLS peptide
MAEVQLVVSGGGLVKPGGSMILSCAASGFTFSNYSMNWVRQAPGKGLEWVSSISSSSEYIYYADFVKGRFTISRDNAKNSLYLQMDSLRAEDTAVYYCAWPGYRKAWGRGTLVTVSSGGGGSGGGGSGGGGSQSVLTQPASVSGSPGQSITISCAGTSSDVGGYNYVSWYQQHPGKAPKLMIYEDSKRPSGVSNRFSGSKSGNTASLTISGLRAEDEADYYCSYCASKGHWLFGGGTKLAVLGAAAEQKLISGSGSGSGSGSNGLLPDDKLTLFCEVSVVQDSVNISGQNTMNMVKVPECRLADELGGLWENSRFTDCCLCVAGQEFQAHKAILAARSPVFSAMFEHEMEESKKNRVEINDVEPEVFKEMMCFIYTGKAPNLDKMADDLLAAADKYALERLKVMCEDALCSNLSVENAAEILILADLHSADQLKTQAVDFINYHASDVLETSGWKSMVVSHPHLVAEAYRSLASAQCPFLGPPRKRLKQSGSGSPAAKRVKLDA

SEQ ID NO: 641 - protein, 505 aa, synthetic construct
  source 1..505: note = INT41-(GS)6-SPOP-NLS peptide
MAEVQLVVSGGGLVKPGGSMILSCAASGFTFSNYSMNWVRQAPGKGLEWVSSISSSSEYIYYADFVKGRFTISRDNAKNSLYLQMDSLRAEDTAVYYCAWPGYRKAWGRGTLVTVSSGGGGSGGGGSGGGGSQSVLTQPASVSGSPGQSITISCAGTSSDVGGYNYVSWYQQHPGKAPKLMIYEDSKRPSGVSNRFSGSKSGNTASLTISGLRAEDEADYYCSYCASKGHWLFGGGTKLAVLGAAAEQKLISGSGSGSGSGSGSNGLLPDDKLTLFCEVSVVQDSVNISGQNTMNMVKVPECRLADELGGLWENSRFTDCCLCVAGQEFQAHKAILAARSPVFSAMFEHEMEESKKNRVEINDVEPEVFKEMMCFIYTGKAPNLDKMADDLLAAADKYALERLKVMCEDALCSNLSVENAAEILILADLHSADQLKTQAVDFINYHASDVLETSGWKSMVVSHPHLVAEAYRSLASAQCPFLGPPRKRLKQSGSGSPAAKRVKLD

SEQ ID NO: 642 - protein, 504 aa, synthetic construct
  source 1..504: note = INT41-(GS)1-SPOP-NLS-HA peptide
MAEVQLVVSGGGLVKPGGSMILSCAASGFTFSNYSMNWVRQAPGKGLEWVSSISSSSEYIYYADFVKGRFTISRDNAKNSLYLQMDSLRAEDTAVYYCAWPGYRKAWGRGTLVTVSSGGGGSGGGGSGGGGSQSVLTQPASVSGSPGQSITISCAGTSSDVGGYNYVSWYQQHPGKAPKLMIYEDSKRPSGVSNRFSGSKSGNTASLTISGLRAEDEADYYCSYCASKGHWLFGGGTKLAVLGAAAEQKLISGSNGLLPDDKLTLFCEVSVVQDSVNISGQNTMNMVKVPECRLADELGGLWENSRFTDCCLCVAGQEFQAHKAILAARSPVFSAMFEHEMEESKKNRVEINDVEPEVFKEMMCFIYTGKAPNLDKMADDLLAAADKYALERLKVMCEDALCSNLSVENAAEILILADLHSADQLKTQAVDFINYHASDVLETSGWKSMVVSHPHLVAEAYRSLASAQCPFLGPPRKRLKQSGSGSPAAKRVKLDYPYDVPDYA

SEQ ID NO: 643 - protein, 506 aa, synthetic construct
  source 1..506: note = INT41-(GS)2-SPOP-NLS-HA peptide
MAEVQLVVSGGGLVKPGGSMILSCAASGFTFSNYSMNWVRQAPGKGLEWVSSISSSSEYIYYADFVKGRFTISRDNAKNSLYLQMDSLRAEDTAVYYCAWPGYRKAWGRGTLVTVSSGGGGSGGGGSGGGGSQSVLTQPASVSGSPGQSITISCAGTSSDVGGYNYVSWYQQHPGKAPKLMIYEDSKRPSGVSNRFSGSKSGNTASLTISGLRAEDEADYYCSYCASKGHWLFGGGTKLAVLGAAAEQKLISGSGSNGLLPDDKLTLFCEVSVVQDSVNISGQNTMNMVKVPECRLADELGGLWENSRFTDCCLCVAGQEFQAHKAILAARSPVFSAMFEHEMEESKKNRVEINDVEPEVFKEMMCFIYTGKAPNLDKMADDLLAAADKYALERLKVMCEDALCSNLSVENAAEILILADLHSADQLKTQAVDFINYHASDVLETSGWKSMVVSHPHLVAEAYRSLASAQCPFLGPPRKRLKQSGSGSPAAKRVKLDYPYDVPDYA

SEQ ID NO: 644 - protein, 508 aa, synthetic construct
  source 1..508: note = INT41-(GS)3-SPOP-NLS-HA peptide
MAEVQLVVSGGGLVKPGGSMILSCAASGFTFSNYSMNWVRQAPGKGLEWVSSISSSSEYIYYADFVKGRFTISRDNAKNSLYLQMDSLRAEDTAVYYCAWPGYRKAWGRGTLVTVSSGGGGSGGGGSGGGGSQSVLTQPASVSGSPGQSITISCAGTSSDVGGYNYVSWYQQHPGKAPKLMIYEDSKRPSGVSNRFSGSKSGNTASLTISGLRAEDEADYYCSYCASKGHWLFGGGTKLAVLGAAAEQKLISGSGSGSNGLLPDDKLTLFCEVSVVQDSVNISGQNTMNMVKVPECRLADELGGLWENSRFTDCCLCVAGQEFQAHKAILAARSPVFSAMFEHEMEESKKNRVEINDVEPEVFKEMMCFIYTGKAPNLDKMADDLLAAADKYALERLKVMCEDALCSNLSVENAAEILILADLHSADQLKTQAVDFINYHASDVLETSGWKSMVVSHPHLVAEAYRSLASAQCPFLGPPRKRLKQSGSGSPAAKRVKLDYPYDVPDYA

SEQ ID NO: 645 - protein, 510 aa, synthetic construct
  source 1..510: note = INT41-(GS)4-SPOP-NLS-HA peptide
MAEVQLVVSGGGLVKPGGSMILSCAASGFTFSNYSMNWVRQAPGKGLEWVSSISSSSEYIYYADFVKGRFTISRDNAKNSLYLQMDSLRAEDTAVYYCAWPGYRKAWGRGTLVTVSSGGGGSGGGGSGGGGSQSVLTQPASVSGSPGQSITISCAGTSSDVGGYNYVSWYQQHPGKAPKLMIYEDSKRPSGVSNRFSGSKSGNTASLTISGLRAEDEADYYCSYCASKGHWLFGGGTKLAVLGAAAEQKLISGSGSGSGSNGLLPDDKLTLFCEVSVVQDSVNISGQNTMNMVKVPECRLADELGGLWENSRFTDCCLCVAGQEFQAHKAILAARSPVFSAMFEHEMEESKKNRVEINDVEPEVFKEMMCFIYTGKAPNLDKMADDLLAAADKYALERLKVMCEDALCSNLSVENAAEILILADLHSADQLKTQAVDFINYHASDVLETSGWKSMVVSHPHLVAEAYRSLASAQCPFLGPPRKRLKQSGSGSPAAKRVKLDYPYDVPDYA

SEQ ID NO: 646 - protein, 513 aa, synthetic construct
  source 1..513: note = INT41-(GS)5-SPOP-NLS-HA peptide
MAEVQLVVSGGGLVKPGGSMILSCAASGFTFSNYSMNWVRQAPGKGLEWVSSISSSSEYIYYADFVKGRFTISRDNAKNSLYLQMDSLRAEDTAVYYCAWPGYRKAWGRGTLVTVSSGGGGSGGGGSGGGGSQSVLTQPASVSGSPGQSITISCAGTSSDVGGYNYVSWYQQHPGKAPKLMIYEDSKRPSGVSNRFSGSKSGNTASLTISGLRAEDEADYYCSYCASKGHWLFGGGTKLAVLGAAAEQKLISGSGSGSGSGSNGLLPDDKLTLFCEVSVVQDSVNISGQNTMNMVKVPECRLADELGGLWENSRFTDCCLCVAGQEFQAHKAILAARSPVFSAMFEHEMEESKKNRVEINDVEPEVFKEMMCFIYTGKAPNLDKMADDLLAAADKYALERLKVMCEDALCSNLSVENAAEILILADLHSADQLKTQAVDFINYHASDVLETSGWKSMVVSHPHLVAEAYRSLASAQCPFLGPPRKRLKQSGSGSPAAKRVKLDYPYDVPDYAA

SEQ ID NO: 647 - protein, 514 aa, synthetic construct
  source 1..514: note = INT41-(GS)6-SPOP-NLS-HA peptide
MAEVQLVVSGGGLVKPGGSMILSCAASGFTFSNYSMNWVRQAPGKGLEWVSSISSSSEYIYYADFVKGRFTISRDNAKNSLYLQMDSLRAEDTAVYYCAWPGYRKAWGRGTLVTVSSGGGGSGGGGSGGGGSQSVLTQPASVSGSPGQSITISCAGTSSDVGGYNYVSWYQQHPGKAPKLMIYEDSKRPSGVSNRFSGSKSGNTASLTISGLRAEDEADYYCSYCASKGHWLFGGGTKLAVLGAAAEQKLISGSGSGSGSGSGSNGLLPDDKLTLFCEVSVVQDSVNISGQNTMNMVKVPECRLADELGGLWENSRFTDCCLCVAGQEFQAHKAILAARSPVFSAMFEHEMEESKKNRVEINDVEPEVFKEMMCFIYTGKAPNLDKMADDLLAAADKYALERLKVMCEDALCSNLSVENAAEILILADLHSADQLKTQAVDFINYHASDVLETSGWKSMVVSHPHLVAEAYRSLASAQCPFLGPPRKRLKQSGSGSPAAKRVKLDYPYDVPDYA

SEQ ID NO: 648 - protein, 434 aa, synthetic construct
  source 1..434: note = INT41-(GS)1-CHIP peptide
MAEVQLVVSGGGLVKPGGSMILSCAASGFTFSNYSMNWVRQAPGKGLEWVSSISSSSEYIYYADFVKGRFTISRDNAKNSLYLQMDSLRAEDTAVYYCAWPGYRKAWGRGTLVTVSSGGGGSGGGGSGGGGSQSVLTQPASVSGSPGQSITISCAGTSSDVGGYNYVSWYQQHPGKAPKLMIYEDSKRPSGVSNRFSGSKSGNTASLTISGLRAEDEADYYCSYCASKGHWLFGGGTKLAVLGAAAEQKLISGSRLNFGDDIPSALRIAKKKRWNSIEERRIHQESELHSYLSRLIAAERERELEECQRNHEGDEDDSHVRAQQACIEAKHDKYMADMDELFSQVDEKRKKRDIPDYLCGKISFELMREPCITPSGITYDRKDIEEHLQRVGHFDPVTRSPLTQEQLIPNLAMKEVIDAFISENGWVEDYGSGS

SEQ ID NO: 649 - protein, 436 aa, synthetic construct
  source 1..436: note = INT41-(GS)2-CHIP peptide
MAEVQLVVSGGGLVKPGGSMILSCAASGFTFSNYSMNWVRQAPGKGLEWVSSISSSSEYIYYADFVKGRFTISRDNAKNSLYLQMDSLRAEDTAVYYCAWPGYRKAWGRGTLVTVSSGGGGSGGGGSGGGGSQSVLTQPASVSGSPGQSITISCAGTSSDVGGYNYVSWYQQHPGKAPKLMIYEDSKRPSGVSNRFSGSKSGNTASLTISGLRAEDEADYYCSYCASKGHWLFGGGTKLAVLGAAAEQKLISGSGSRLNFGDDIPSALRIAKKKRWNSIEERRIHQESELHSYLSRLIAAERERELEECQRNHEGDEDDSHVRAQQACIEAKHDKYMADMDELFSQVDEKRKKRDIPDYLCGKISFELMREPCITPSGITYDRKDIEEHLQRVGHFDPVTRSPLTQEQLIPNLAMKEVIDAFISENGWVEDYGSGS

SEQ ID NO: 650 - protein, 438 aa, synthetic construct
  source 1..438: note = INT41-(GS)3-CHIP peptide
MAEVQLVVSGGGLVKPGGSMILSCAASGFTFSNYSMNWVRQAPGKGLEWVSSISSSSEYIYYADFVKGRFTISRDNAKNSLYLQMDSLRAEDTAVYYCAWPGYRKAWGRGTLVTVSSGGGGSGGGGSGGGGSQSVLTQPASVSGSPGQSITISCAGTSSDVGGYNYVSWYQQHPGKAPKLMIYEDSKRPSGVSNRFSGSKSGNTASLTISGLRAEDEADYYCSYCASKGHWLFGGGTKLAVLGAAAEQKLISGSGSGSRLNFGDDIPSALRIAKKKRWNSIEERRIHQESELHSYLSRLIAAERERELEECQRNHEGDEDDSHVRAQQACIEAKHDKYMADMDELFSQVDEKRKKRDIPDYLCGKISFELMREPCITPSGITYDRKDIEEHLQRVGHFDPVTRSPLTQEQLIPNLAMKEVIDAFISENGWVEDYGSGS

SEQ ID NO: 651 - protein, 440 aa, synthetic construct
  source 1..440: note = INT41-(GS)4-CHIP peptide
MAEVQLVVSGGGLVKPGGSMILSCAASGFTFSNYSMNWVRQAPGKGLEWVSSISSSSEYIYYADFVKGRFTISRDNAKNSLYLQMDSLRAEDTAVYYCAWPGYRKAWGRGTLVTVSSGGGGSGGGGSGGGGSQSVLTQPASVSGSPGQSITISCAGTSSDVGGYNYVSWYQQHPGKAPKLMIYEDSKRPSGVSNRFSGSKSGNTASLTISGLRAEDEADYYCSYCASKGHWLFGGGTKLAVLGAAAEQKLISGSGSGSGSRLNFGDDIPSALRIAKKKRWNSIEERRIHQESELHSYLSRLIAAERERELEECQRNHEGDEDDSHVRAQQACIEAKHDKYMADMDELFSQVDEKRKKRDIPDYLCGKISFELMREPCITPSGITYDRKDIEEHLQRVGHFDPVTRSPLTQEQLIPNLAMKEVIDAFISENGWVEDYGSGS

SEQ ID NO: 652 - protein, 442 aa, synthetic construct
  source 1..442: note = INT41-(GS)5-CHIP peptide
MAEVQLVVSGGGLVKPGGSMILSCAASGFTFSNYSMNWVRQAPGKGLEWVSSISSSSEYIYYADFVKGRFTISRDNAKNSLYLQMDSLRAEDTAVYYCAWPGYRKAWGRGTLVTVSSGGGGSGGGGSGGGGSQSVLTQPASVSGSPGQSITISCAGTSSDVGGYNYVSWYQQHPGKAPKLMIYEDSKRPSGVSNRFSGSKSGNTASLTISGLRAEDEADYYCSYCASKGHWLFGGGTKLAVLGAAAEQKLISGSGSGSGSGSRLNFGDDIPSALRIAKKKRWNSIEERRIHQESELHSYLSRLIAAERERELEECQRNHEGDEDDSHVRAQQACIEAKHDKYMADMDELFSQVDEKRKKRDIPDYLCGKISFELMREPCITPSGITYDRKDIEEHLQRVGHFDPVTRSPLTQEQLIPNLAMKEVIDAFISENGWVEDYGSGS

SEQ ID NO: 653 - protein, 444 aa, synthetic construct
  source 1..444: note = INT41-(GS)6-CHIP peptide
MAEVQLVVSGGGLVKPGGSMILSCAASGFTFSNYSMNWVRQAPGKGLEWVSSISSSSEYIYYADFVKGRFTISRDNAKNSLYLQMDSLRAEDTAVYYCAWPGYRKAWGRGTLVTVSSGGGGSGGGGSGGGGSQSVLTQPASVSGSPGQSITISCAGTSSDVGGYNYVSWYQQHPGKAPKLMIYEDSKRPSGVSNRFSGSKSGNTASLTISGLRAEDEADYYCSYCASKGHWLFGGGTKLAVLGAAAEQKLISGSGSGSGSGSGSRLNFGDDIPSALRIAKKKRWNSIEERRIHQESELHSYLSRLIAAERERELEECQRNHEGDEDDSHVRAQQACIEAKHDKYMADMDELFSQVDEKRKKRDIPDYLCGKISFELMREPCITPSGITYDRKDIEEHLQRVGHFDPVTRSPLTQEQLIPNLAMKEVIDAFISENGWVEDYGSGS

SEQ ID NO: 654 - protein, 443 aa, synthetic construct
  source 1..443: note = INT41-(GS)1-CHIP-HA peptide
MAEVQLVVSGGGLVKPGGSMILSCAASGFTFSNYSMNWVRQAPGKGLEWVSSISSSSEYIYYADFVKGRFTISRDNAKNSLYLQMDSLRAEDTAVYYCAWPGYRKAWGRGTLVTVSSGGGGSGGGGSGGGGSQSVLTQPASVSGSPGQSITISCAGTSSDVGGYNYVSWYQQHPGKAPKLMIYEDSKRPSGVSNRFSGSKSGNTASLTISGLRAEDEADYYCSYCASKGHWLFGGGTKLAVLGAAAEQKLISGSRLNFGDDIPSALRIAKKKRWNSIEERRIHQESELHSYLSRLIAAERERELEECQRNHEGDEDDSHVRAQQACIEAKHDKYMADMDELFSQVDEKRKKRDIPDYLCGKISFELMREPCITPSGITYDRKDIEEHLQRVGHFDPVTRSPLTQEQLIPNLAMKEVIDAFISENGWVEDYGSGSYPYDVPDYA

SEQ ID NO: 655 - protein, 445 aa, synthetic construct
  source 1..445: note = INT41-(GS)2-CHIP-HA peptide
MAEVQLVVSGGGLVKPGGSMILSCAASGFTFSNYSMNWVRQAPGKGLEWVSSISSSSEYIYYADFVKGRFTISRDNAKNSLYLQMDSLRAEDTAVYYCAWPGYRKAWGRGTLVTVSSGGGGSGGGGSGGGGSQSVLTQPASVSGSPGQSITISCAGTSSDVGGYNYVSWYQQHPGKAPKLMIYEDSKRPSGVSNRFSGSKSGNTASLTISGLRAEDEADYYCSYCASKGHWLFGGGTKLAVLGAAAEQKLISGSGSRLNFGDDIPSALRIAKKKRWNSIEERRIHQESELHSYLSRLIAAERERELEECQRNHEGDEDDSHVRAQQACIEAKHDKYMADMDELFSQVDEKRKKRDIPDYLCGKISFELMREPCITPSGITYDRKDIEEHLQRVGHFDPVTRSPLTQEQLIPNLAMKEVIDAFISENGWVEDYGSGSYPYDVPDYA

SEQ ID NO: 656 - protein, 447 aa, synthetic construct
  source 1..447: note = INT41-(GS)3-CHIP-HA peptide
MAEVQLVVSGGGLVKPGGSMILSCAASGFTFSNYSMNWVRQAPGKGLEWVSSISSSSEYIYYADFVKGRFTISRDNAKNSLYLQMDSLRAEDTAVYYCAWPGYRKAWGRGTLVTVSSGGGGSGGGGSGGGGSQSVLTQPASVSGSPGQSITISCAGTSSDVGGYNYVSWYQQHPGKAPKLMIYEDSKRPSGVSNRFSGSKSGNTASLTISGLRAEDEADYYCSYCASKGHWLFGGGTKLAVLGAAAEQKLISGSGSGSRLNFGDDIPSALRIAKKKRWNSIEERRIHQESELHSYLSRLIAAERERELEECQRNHEGDEDDSHVRAQQACIEAKHDKYMADMDELFSQVDEKRKKRDIPDYLCGKISFELMREPCITPSGITYDRKDIEEHLQRVGHFDPVTRSPLTQEQLIPNLAMKEVIDAFISENGWVEDYGSGSYPYDVPDYA

SEQ ID NO: 657 - protein, 449 aa, synthetic construct
  source 1..449: note = INT41-(GS)4-CHIP-HA peptide
MAEVQLVVSGGGLVKPGGSMILSCAASGFTFSNYSMNWVRQAPGKGLEWVSSISSSSEYIYYADFVKGRFTISRDNAKNSLYLQMDSLRAEDTAVYYCAWPGYRKAWGRGTLVTVSSGGGGSGGGGSGGGGSQSVLTQPASVSGSPGQSITISCAGTSSDVGGYNYVSWYQQHPGKAPKLMIYEDSKRPSGVSNRFSGSKSGNTASLTISGLRAEDEADYYCSYCASKGHWLFGGGTKLAVLGAAAEQKLISGSGSGSGSRLNFGDDIPSALRIAKKKRWNSIEERRIHQESELHSYLSRLIAAERERELEECQRNHEGDEDDSHVRAQQACIEAKHDKYMADMDELFSQVDEKRKKRDIPDYLCGKISFELMREPCITPSGITYDRKDIEEHLQRVGHFDPVTRSPLTQEQLIPNLAMKEVIDAFISENGWVEDYGSGSYPYDVPDYA

SEQ ID NO: 658 - protein, 451 aa, synthetic construct
  source 1..451: note = INT41-(GS)5-CHIP-HA peptide
MAEVQLVVSGGGLVKPGGSMILSCAASGFTFSNYSMNWVRQAPGKGLEWVSSISSSSEYIYYADFVKGRFTISRDNAKNSLYLQMDSLRAEDTAVYYCAWPGYRKAWGRGTLVTVSSGGGGSGGGGSGGGGSQSVLTQPASVSGSPGQSITISCAGTSSDVGGYNYVSWYQQHPGKAPKLMIYEDSKRPSGVSNRFSGSKSGNTASLTISGLRAEDEADYYCSYCASKGHWLFGGGTKLAVLGAAAEQKLISGSGSGSGSGSRLNFGDDIPSALRIAKKKRWNSIEERRIHQESELHSYLSRLIAAERERELEECQRNHEGDEDDSHVRAQQACIEAKHDKYMADMDELFSQVDEKRKKRDIPDYLCGKISFELMREPCITPSGITYDRKDIEEHLQRVGHFDPVTRSPLTQEQLIPNLAMKEVIDAFISENGWVEDYGSGSYPYDVPDYA

SEQ ID NO: 659 - protein, 453 aa, synthetic construct
  source 1..453: note = INT41-(GS)6-CHIP-HA peptide
MAEVQLVVSGGGLVKPGGSMILSCAASGFTFSNYSMNWVRQAPGKGLEWVSSISSSSEYIYYADFVKGRFTISRDNAKNSLYLQMDSLRAEDTAVYYCAWPGYRKAWGRGTLVTVSSGGGGSGGGGSGGGGSQSVLTQPASVSGSPGQSITISCAGTSSDVGGYNYVSWYQQHPGKAPKLMIYEDSKRPSGVSNRFSGSKSGNTASLTISGLRAEDEADYYCSYCASKGHWLFGGGTKLAVLGAAAEQKLISGSGSGSGSGSGSRLNFGDDIPSALRIAKKKRWNSIEERRIHQESELHSYLSRLIAAERERELEECQRNHEGDEDDSHVRAQQACIEAKHDKYMADMDELFSQVDEKRKKRDIPDYLCGKISFELMREPCITPSGITYDRKDIEEHLQRVGHFDPVTRSPLTQEQLIPNLAMKEVIDAFISENGWVEDYGSGSYPYDVPDYA

SEQ ID NO: 660 - protein, 288 aa, synthetic construct
  source 1..288: note = DCAF1-(GS)1-INT41 peptide
QAPINFTSRLNRRASFPKYGGVDGGCFDRHLIFSRGSAEVQLVVSGGGLVKPGGSMILSCAASGFTFSNYSMNWVRQAPGKGLEWVSSISSSSEYIYYADFVKGRFTISRDNAKNSLYLQMDSLRAEDTAVYYCAWPGYRKAWGRGTLVTVSSGGGGSGGGGSGGGGSQSVLTQPASVSGSPGQSITISCAGTSSDVGGYNYVSWYQQHPGKAPKLMIYEDSKRPSGVSNRFSGSKSGNTASLTISGLRAEDEADYYCSYCASKGHWLFGGGTKLAVLGAAAEQKLIS

SEQ ID NO: 661 - protein, 290 aa, synthetic construct
  source 1..290: note = DCAF1-(GS)2-INT41 peptide
QAPINFTSRLNRRASFPKYGGVDGGCFDRHLIFSRGSGSAEVQLVVSGGGLVKPGGSMILSCAASGFTFSNYSMNWVRQAPGKGLEWVSSISSSSEYIYYADFVKGRFTISRDNAKNSLYLQMDSLRAEDTAVYYCAWPGYRKAWGRGTLVTVSSGGGGSGGGGSGGGGSQSVLTQPASVSGSPGQSITISCAGTSSDVGGYNYVSWYQQHPGKAPKLMIYEDSKRPSGVSNRFSGSKSGNTASLTISGLRAEDEADYYCSYCASKGHWLFGGGTKLAVLGAAAEQKLIS

SEQ ID NO: 662 - protein, 292 aa, synthetic construct
  source 1..292: note = DCAF1-(GS)3-INT41 peptide
QAPINFTSRLNRRASFPKYGGVDGGCFDRHLIFSRGSGSGSAEVQLVVSGGGLVKPGGSMILSCAASGFTFSNYSMNWVRQAPGKGLEWVSSISSSSEYIYYADFVKGRFTISRDNAKNSLYLQMDSLRAEDTAVYYCAWPGYRKAWGRGTLVTVSSGGGGSGGGGSGGGGSQSVLTQPASVSGSPGQSITISCAGTSSDVGGYNYVSWYQQHPGKAPKLMIYEDSKRPSGVSNRFSGSKSGNTASLTISGLRAEDEADYYCSYCASKGHWLFGGGTKLAVLGAAAEQKLIS

SEQ ID NO: 663 - protein, 294 aa, synthetic construct
  source 1..294: note = DCAF1-(GS)4-INT41 peptide
QAPINFTSRLNRRASFPKYGGVDGGCFDRHLIFSRGSGSGSGSAEVQLVVSGGGLVKPGGSMILSCAASGFTFSNYSMNWVRQAPGKGLEWVSSISSSSEYIYYADFVKGRFTISRDNAKNSLYLQMDSLRAEDTAVYYCAWPGYRKAWGRGTLVTVSSGGGGSGGGGSGGGGSQSVLTQPASVSGSPGQSITISCAGTSSDVGGYNYVSWYQQHPGKAPKLMIYEDSKRPSGVSNRFSGSKSGNTASLTISGLRAEDEADYYCSYCASKGHWLFGGGTKLAVLGAAAEQKLIS

SEQ ID NO: 664 - protein, 296 aa, synthetic construct
  source 1..296: note = DCAF1-(GS)5-INT41 peptide
QAPINFTSRLNRRASFPKYGGVDGGCFDRHLIFSRGSGSGSGSGSAEVQLVVSGGGLVKPGGSMILSCAASGFTFSNYSMNWVRQAPGKGLEWVSSISSSSEYIYYADFVKGRFTISRDNAKNSLYLQMDSLRAEDTAVYYCAWPGYRKAWGRGTLVTVSSGGGGSGGGGSGGGGSQSVLTQPASVSGSPGQSITISCAGTSSDVGGYNYVSWYQQHPGKAPKLMIYEDSKRPSGVSNRFSGSKSGNTASLTISGLRAEDEADYYCSYCASKGHWLFGGGTKLAVLGAAAEQKLIS

SEQ ID NO: 665 - protein, 298 aa, synthetic construct
  source 1..298: note = DCAF1-(GS)6-INT41 peptide
QAPINFTSRLNRRASFPKYGGVDGGCFDRHLIFSRGSGSGSGSGSGSAEVQLVVSGGGLVKPGGSMILSCAASGFTFSNYSMNWVRQAPGKGLEWVSSISSSSEYIYYADFVKGRFTISRDNAKNSLYLQMDSLRAEDTAVYYCAWPGYRKAWGRGTLVTVSSGGGGSGGGGSGGGGSQSVLTQPASVSGSPGQSITISCAGTSSDVGGYNYVSWYQQHPGKAPKLMIYEDSKRPSGVSNRFSGSKSGNTASLTISGLRAEDEADYYCSYCASKGHWLFGGGTKLAVLGAAAEQKLIS

SEQ ID NO: 666 - protein, 304 aa, synthetic construct
  source 1..304: note = HA-DCAF1-(GS)1-INT41 peptide
MYPYDVPDYAGSGSGSQAPINFTSRLNRRASFPKYGGVDGGCFDRHLIFSRGSAEVQLVVSGGGLVKPGGSMILSCAASGFTFSNYSMNWVRQAPGKGLEWVSSISSSSEYIYYADFVKGRFTISRDNAKNSLYLQMDSLRAEDTAVYYCAWPGYRKAWGRGTLVTVSSGGGGSGGGGSGGGGSQSVLTQPASVSGSPGQSITISCAGTSSDVGGYNYVSWYQQHPGKAPKLMIYEDSKRPSGVSNRFSGSKSGNTASLTISGLRAEDEADYYCSYCASKGHWLFGGGTKLAVLGAAAEQKLIS

SEQ ID NO: 667 - protein, 306 aa, synthetic construct
  source 1..306: note = HA-DCAF1-(GS)2-INT41 peptide
MYPYDVPDYAGSGSGSQAPINFTSRLNRRASFPKYGGVDGGCFDRHLIFSRGSGSAEVQLVVSGGGLVKPGGSMILSCAASGFTFSNYSMNWVRQAPGKGLEWVSSISSSSEYIYYADFVKGRFTISRDNAKNSLYLQMDSLRAEDTAVYYCAWPGYRKAWGRGTLVTVSSGGGGSGGGGSGGGGSQSVLTQPASVSGSPGQSITISCAGTSSDVGGYNYVSWYQQHPGKAPKLMIYEDSKRPSGVSNRFSGSKSGNTASLTISGLRAEDEADYYCSYCASKGHWLFGGGTKLAVLGAAAEQKLIS

SEQ ID NO: 668 - protein, 308 aa, synthetic construct
  source 1..308: note = HA-DCAF1-(GS)3-INT41 peptide
MYPYDVPDYAGSGSGSQAPINFTSRLNRRASFPKYGGVDGGCFDRHLIFSRGSGSGSAEVQLVVSGGGLVKPGGSMILSCAASGFTFSNYSMNWVRQAPGKGLEWVSSISSSSEYIYYADFVKGRFTISRDNAKNSLYLQMDSLRAEDTAVYYCAWPGYRKAWGRGTLVTVSSGGGGSGGGGSGGGGSQSVLTQPASVSGSPGQSITISCAGTSSDVGGYNYVSWYQQHPGKAPKLMIYEDSKRPSGVSNRFSGSKSGNTASLTISGLRAEDEADYYCSYCASKGHWLFGGGTKLAVLGAAAEQKLIS

SEQ ID NO: 669 - protein, 310 aa, synthetic construct
  source 1..310: note = HA-DCAF1-(GS)4-INT41 peptide
MYPYDVPDYAGSGSGSQAPINFTSRLNRRASFPKYGGVDGGCFDRHLIFSRGSGSGSGSAEVQLVVSGGGLVKPGGSMILSCAASGFTFSNYSMNWVRQAPGKGLEWVSSISSSSEYIYYADFVKGRFTISRDNAKNSLYLQMDSLRAEDTAVYYCAWPGYRKAWGRGTLVTVSSGGGGSGGGGSGGGGSQSVLTQPASVSGSPGQSITISCAGTSSDVGGYNYVSWYQQHPGKAPKLMIYEDSKRPSGVSNRFSGSKSGNTASLTISGLRAEDEADYYCSYCASKGHWLFGGGTKLAVLGAAAEQKLIS

SEQ ID NO: 670 - protein, 312 aa, synthetic construct
  source 1..312: note = HA-DCAF1-(GS)5-INT41 peptide
MYPYDVPDYAGSGSGSQAPINFTSRLNRRASFPKYGGVDGGCFDRHLIFSRGSGSGSGSGSAEVQLVVSGGGLVKPGGSMILSCAASGFTFSNYSMNWVRQAPGKGLEWVSSISSSSEYIYYADFVKGRFTISRDNAKNSLYLQMDSLRAEDTAVYYCAWPGYRKAWGRGTLVTVSSGGGGSGGGGSGGGGSQSVLTQPASVSGSPGQSITISCAGTSSDVGGYNYVSWYQQHPGKAPKLMIYEDSKRPSGVSNRFSGSKSGNTASLTISGLRAEDEADYYCSYCASKGHWLFGGGTKLAVLGAAAEQKLIS

SEQ ID NO: 671 - protein, 314 aa, synthetic construct
  source 1..314: note = HA-DCAF1-(GS)6-INT41 peptide
MYPYDVPDYAGSGSGSQAPINFTSRLNRRASFPKYGGVDGGCFDRHLIFSRGSGSGSGSGSGSAEVQLVVSGGGLVKPGGSMILSCAASGFTFSNYSMNWVRQAPGKGLEWVSSISSSSEYIYYADFVKGRFTISRDNAKNSLYLQMDSLRAEDTAVYYCAWPGYRKAWGRGTLVTVSSGGGGSGGGGSGGGGSQSVLTQPASVSGSPGQSITISCAGTSSDVGGYNYVSWYQQHPGKAPKLMIYEDSKRPSGVSNRFSGSKSGNTASLTISGLRAEDEADYYCSYCASKGHWLFGGGTKLAVLGAAAEQKLIS

SEQ ID NO: 672 - protein, 609 aa, synthetic construct
  source 1..609: note = INT41-(GS)1-E6AP peptide
AEVQLVVSGGGLVKPGGSMILSCAASGFTFSNYSMNWVRQAPGKGLEWVSSISSSSEYIYYADFVKGRFTISRDNAKNSLYLQMDSLRAEDTAVYYCAWPGYRKAWGRGTLVTVSSGGGGSGGGGSGGGGSQSVLTQPASVSGSPGQSITISCAGTSSDVGGYNYVSWYQQHPGKAPKLMIYEDSKRPSGVSNRFSGSKSGNTASLTISGLRAEDEADYYCSYCASKGHWLFGGGTKLAVLGAAAEQKLISGSNPYLRLKVRRDHIIDDALVRLEMIAMENPADLKKQLYVEFEGEQGVDEGGVSKEFFQLVVEEIFNPDIGMFTYDESTKLFWFNPSSFETEGQFTLIGIVLGLAIYNNCILDVHFPMVVYRKLMGKKGTFRDLGDSHPVLYQSLKDLLEYEGNVEDDMMITFQISQTDLFGNPMMYDLKENGDKIPITNENRKEFVNLYSDYILNKSVEKQFKAFRRGFHMVTNESPLKYLFRPEEIELLICGSRNLDFQALEETTEYDGGYTRDSVLIREFWEIVHSFTDEQKRLFLQFTTGTDRAPVGGLGKLKMIIAKNGPDTERLPTSHTCFNVLLLPEYSSKEKLKERLLKAITYAKGFGML

SEQ ID NO: 673 - protein, 611 aa, synthetic construct
  source 1..611: note = INT41-(GS)2-E6AP peptide
AEVQLVVSGGGLVKPGGSMILSCAASGFTFSNYSMNWVRQAPGKGLEWVSSISSSSEYIYYADFVKGRFTISRDNAKNSLYLQMDSLRAEDTAVYYCAWPGYRKAWGRGTLVTVSSGGGGSGGGGSGGGGSQSVLTQPASVSGSPGQSITISCAGTSSDVGGYNYVSWYQQHPGKAPKLMIYEDSKRPSGVSNRFSGSKSGNTASLTISGLRAEDEADYYCSYCASKGHWLFGGGTKLAVLGAAAEQKLISGSGSNPYLRLKVRRDHIIDDALVRLEMIAMENPADLKKQLYVEFEGEQGVDEGGVSKEFFQLVVEEIFNPDIGMFTYDESTKLFWFNPSSFETEGQFTLIGIVLGLAIYNNCILDVHFPMVVYRKLMGKKGTFRDLGDSHPVLYQSLKDLLEYEGNVEDDMMITFQISQTDLFGNPMMYDLKENGDKIPITNENRKEFVNLYSDYILNKSVEKQFKAFRRGFHMVTNESPLKYLFRPEEIELLICGSRNLDFQALEETTEYDGGYTRDSVLIREFWEIVHSFTDEQKRLFLQFTTGTDRAPVGGLGKLKMIIAKNGPDTERLPTSHTCFNVLLLPEYSSKEKLKERLLKAITYAKGFGML

SEQ ID NO: 674 - protein, 613 aa, synthetic construct
  source 1..613: note = INT41-(GS)3-E6AP peptide
AEVQLVVSGGGLVKPGGSMILSCAASGFTFSNYSMNWVRQAPGKGLEWVSSISSSSEYIYYADFVKGRFTISRDNAKNSLYLQMDSLRAEDTAVYYCAWPGYRKAWGRGTLVTVSSGGGGSGGGGSGGGGSQSVLTQPASVSGSPGQSITISCAGTSSDVGGYNYVSWYQQHPGKAPKLMIYEDSKRPSGVSNRFSGSKSGNTASLTISGLRAEDEADYYCSYCASKGHWLFGGGTKLAVLGAAAEQKLISGSGSGSNPYLRLKVRRDHIIDDALVRLEMIAMENPADLKKQLYVEFEGEQGVDEGGVSKEFFQLVVEEIFNPDIGMFTYDESTKLFWFNPSSFETEGQFTLIGIVLGLAIYNNCILDVHFPMVVYRKLMGKKGTFRDLGDSHPVLYQSLKDLLEYEGNVEDDMMITFQISQTDLFGNPMMYDLKENGDKIPITNENRKEFVNLYSDYILNKSVEKQFKAFRRGFHMVTNESPLKYLFRPEEIELLICGSRNLDFQALEETTEYDGGYTRDSVLIREFWEIVHSFTDEQKRLFLQFTTGTDRAPVGGLGKLKMIIAKNGPDTERLPTSHTCFNVLLLPEYSSKEKLKERLLKAITYAKGFGML

SEQ ID NO: 675 - protein, 615 aa, synthetic construct
  source 1..615: note = INT41-(GS)4-E6AP peptide
AEVQLVVSGGGLVKPGGSMILSCAASGFTFSNYSMNWVRQAPGKGLEWVSSISSSSEYIYYADFVKGRFTISRDNAKNSLYLQMDSLRAEDTAVYYCAWPGYRKAWGRGTLVTVSSGGGGSGGGGSGGGGSQSVLTQPASVSGSPGQSITISCAGTSSDVGGYNYVSWYQQHPGKAPKLMIYEDSKRPSGVSNRFSGSKSGNTASLTISGLRAEDEADYYCSYCASKGHWLFGGGTKLAVLGAAAEQKLISGSGSGSGSNPYLRLKVRRDHIIDDALVRLEMIAMENPADLKKQLYVEFEGEQGVDEGGVSKEFFQLVVEEIFNPDIGMFTYDESTKLFWFNPSSFETEGQFTLIGIVLGLAIYNNCILDVHFPMVVYRKLMGKKGTFRDLGDSHPVLYQSLKDLLEYEGNVEDDMMITFQISQTDLFGNPMMYDLKENGDKIPITNENRKEFVNLYSDYILNKSVEKQFKAFRRGFHMVTNESPLKYLFRPEEIELLICGSRNLDFQALEETTEYDGGYTRDSVLIREFWEIVHSFTDEQKRLFLQFTTGTDRAPVGGLGKLKMIIAKNGPDTERLPTSHTCFNVLLLPEYSSKEKLKERLLKAITYAKGFGML

SEQ ID NO: 676 - protein, 617 aa, synthetic construct
  source 1..617: note = INT41-(GS)5-E6AP peptide
AEVQLVVSGGGLVKPGGSMILSCAASGFTFSNYSMNWVRQAPGKGLEWVSSISSSSEYIYYADFVKGRFTISRDNAKNSLYLQMDSLRAEDTAVYYCAWPGYRKAWGRGTLVTVSSGGGGSGGGGSGGGGSQSVLTQPASVSGSPGQSITISCAGTSSDVGGYNYVSWYQQHPGKAPKLMIYEDSKRPSGVSNRFSGSKSGNTASLTISGLRAEDEADYYCSYCASKGHWLFGGGTKLAVLGAAAEQKLISGSGSGSGSGSNPYLRLKVRRDHIIDDALVRLEMIAMENPADLKKQLYVEFEGEQGVDEGGVSKEFFQLVVEEIFNPDIGMFTYDESTKLFWFNPSSFETEGQFTLIGIVLGLAIYNNCILDVHFPMVVYRKLMGKKGTFRDLGDSHPVLYQSLKDLLEYEGNVEDDMMITFQISQTDLFGNPMMYDLKENGDKIPITNENRKEFVNLYSDYILNKSVEKQFKAFRRGFHMVTNESPLKYLFRPEEIELLICGSRNLDFQALEETTEYDGGYTRDSVLIREFWEIVHSFTDEQKRLFLQFTTGTDRAPVGGLGKLKMIIAKNGPDTERLPTSHTCFNVLLLPEYSSKEKLKERLLKAITYAKGFGML

SEQ ID NO: 677 - protein, 619 aa, synthetic construct
  source 1..619: note = INT41-(GS)6-E6AP peptide
AEVQLVVSGGGLVKPGGSMILSCAASGFTFSNYSMNWVRQAPGKGLEWVSSISSSSEYIYYADFVKGRFTISRDNAKNSLYLQMDSLRAEDTAVYYCAWPGYRKAWGRGTLVTVSSGGGGSGGGGSGGGGSQSVLTQPASVSGSPGQSITISCAGTSSDVGGYNYVSWYQQHPGKAPKLMIYEDSKRPSGVSNRFSGSKSGNTASLTISGLRAEDEADYYCSYCASKGHWLFGGGTKLAVLGAAAEQKLISGSGSGSGSGSGSNPYLRLKVRRDHIIDDALVRLEMIAMENPADLKKQLYVEFEGEQGVDEGGVSKEFFQLVVEEIFNPDIGMFTYDESTKLFWFNPSSFETEGQFTLIGIVLGLAIYNNCILDVHFPMVVYRKLMGKKGTFRDLGDSHPVLYQSLKDLLEYEGNVEDDMMITFQISQTDLFGNPMMYDLKENGDKIPITNENRKEFVNLYSDYILNKSVEKQFKAFRRGFHMVTNESPLKYLFRPEEIELLICGSRNLDFQALEETTEYDGGYTRDSVLIREFWEIVHSFTDEQKRLFLQFTTGTDRAPVGGLGKLKMIIAKNGPDTERLPTSHTCFNVLLLPEYSSKEKLKERLLKAITYAKGFGML

SEQ ID NO: 678 - protein, 625 aa, synthetic construct
  source 1..625: note = HA-INT41-(GS)1-E6AP peptide
MYPYDVPDYAGSGSGSAEVQLVVSGGGLVKPGGSMILSCAASGFTFSNYSMNWVRQAPGKGLEWVSSISSSSEYIYYADFVKGRFTISRDNAKNSLYLQMDSLRAEDTAVYYCAWPGYRKAWGRGTLVTVSSGGGGSGGGGSGGGGSQSVLTQPASVSGSPGQSITISCAGTSSDVGGYNYVSWYQQHPGKAPKLMIYEDSKRPSGVSNRFSGSKSGNTASLTISGLRAEDEADYYCSYCASKGHWLFGGGTKLAVLGAAAEQKLISGSNPYLRLKVRRDHIIDDALVRLEMIAMENPADLKKQLYVEFEGEQGVDEGGVSKEFFQLVVEEIFNPDIGMFTYDESTKLFWFNPSSFETEGQFTLIGIVLGLAIYNNCILDVHFPMVVYRKLMGKKGTFRDLGDSHPVLYQSLKDLLEYEGNVEDDMMITFQISQTDLFGNPMMYDLKENGDKIPITNENRKEFVNLYSDYILNKSVEKQFKAFRRGFHMVTNESPLKYLFRPEEIELLICGSRNLDFQALEETTEYDGGYTRDSVLIREFWEIVHSFTDEQKRLFLQFTTGTDRAPVGGLGKLKMIIAKNGPDTERLPTSHTCFNVLLLPEYSSKEKLKERLLKAITYAKGFGML

SEQ ID NO: 679 - protein, 627 aa, synthetic construct
  source 1..627: note = HA-INT41-(GS)2-E6AP peptide
MYPYDVPDYAGSGSGSAEVQLVVSGGGLVKPGGSMILSCAASGFTFSNYSMNWVRQAPGKGLEWVSSISSSSEYIYYADFVKGRFTISRDNAKNSLYLQMDSLRAEDTAVYYCAWPGYRKAWGRGTLVTVSSGGGGSGGGGSGGGGSQSVLTQPASVSGSPGQSITISCAGTSSDVGGYNYVSWYQQHPGKAPKLMIYEDSKRPSGVSNRFSGSKSGNTASLTISGLRAEDEADYYCSYCASKGHWLFGGGTKLAVLGAAAEQKLISGSGSNPYLRLKVRRDHIIDDALVRLEMIAMENPADLKKQLYVEFEGEQGVDEGGVSKEFFQLVVEEIFNPDIGMFTYDESTKLFWFNPSSFETEGQFTLIGIVLGLAIYNNCILDVHFPMVVYRKLMGKKGTFRDLGDSHPVLYQSLKDLLEYEGNVEDDMMITFQISQTDLFGNPMMYDLKENGDKIPITNENRKEFVNLYSDYILNKSVEKQFKAFRRGFHMVTNESPLKYLFRPEEIELLICGSRNLDFQALEETTEYDGGYTRDSVLIREFWEIVHSFTDEQKRLFLQFTTGTDRAPVGGLGKLKMIIAKNGPDTERLPTSHTCFNVLLLPEYSSKEKLKERLLKAITYAKGFGML

SEQ ID NO: 680 - protein, 629 aa, synthetic construct
  source 1..629: note = HA-INT41-(GS)3-E6AP peptide
MYPYDVPDYAGSGSGSAEVQLVVSGGGLVKPGGSMILSCAASGFTFSNYSMNWVRQAPGKGLEWVSSISSSSEYIYYADFVKGRFTISRDNAKNSLYLQMDSLRAEDTAVYYCAWPGYRKAWGRGTLVTVSSGGGGSGGGGSGGGGSQSVLTQPASVSGSPGQSITISCAGTSSDVGGYNYVSWYQQHPGKAPKLMIYEDSKRPSGVSNRFSGSKSGNTASLTISGLRAEDEADYYCSYCASKGHWLFGGGTKLAVLGAAAEQKLISGSGSGSNPYLRLKVRRDHIIDDALVRLEMIAMENPADLKKQLYVEFEGEQGVDEGGVSKEFFQLVVEEIFNPDIGMFTYDESTKLFWFNPSSFETEGQFTLIGIVLGLAIYNNCILDVHFPMVVYRKLMGKKGTFRDLGDSHPVLYQSLKDLLEYEGNVEDDMMITFQISQTDLFGNPMMYDLKENGDKIPITNENRKEFVNLYSDYILNKSVEKQFKAFRRGFHMVTNESPLKYLFRPEEIELLICGSRNLDFQALEETTEYDGGYTRDSVLIREFWEIVHSFTDEQKRLFLQFTTGTDRAPVGGLGKLKMIIAKNGPDTERLPTSHTCFNVLLLPEYSSKEKLKERLLKAITYAKGFGML

SEQ ID NO: 681 - protein, 631 aa, synthetic construct
  source 1..631: note = HA-INT41-(GS)4-E6AP peptide
MYPYDVPDYAGSGSGSAEVQLVVSGGGLVKPGGSMILSCAASGFTFSNYSMNWVRQAPGKGLEWVSSISSSSEYIYYADFVKGRFTISRDNAKNSLYLQMDSLRAEDTAVYYCAWPGYRKAWGRGTLVTVSSGGGGSGGGGSGGGGSQSVLTQPASVSGSPGQSITISCAGTSSDVGGYNYVSWYQQHPGKAPKLMIYEDSKRPSGVSNRFSGSKSGNTASLTISGLRAEDEADYYCSYCASKGHWLFGGGTKLAVLGAAAEQKLISGSGSGSGSNPYLRLKVRRDHIIDDALVRLEMIAMENPADLKKQLYVEFEGEQGVDEGGVSKEFFQLVVEEIFNPDIGMFTYDESTKLFWFNPSSFETEGQFTLIGIVLGLAIYNNCILDVHFPMVVYRKLMGKKGTFRDLGDSHPVLYQSLKDLLEYEGNVEDDMMITFQISQTDLFGNPMMYDLKENGDKIPITNENRKEFVNLYSDYILNKSVEKQFKAFRRGFHMVTNESPLKYLFRPEEIELLICGSRNLDFQALEETTEYDGGYTRDSVLIREFWEIVHSFTDEQKRLFLQFTTGTDRAPVGGLGKLKMIIAKNGPDTERLPTSHTCFNVLLLPEYSSKEKLKERLLKAITYAKGFGML

SEQ ID NO: 682 - protein, 633 aa, synthetic construct
  source 1..633: note = HA-INT41-(GS)5-E6AP peptide
MYPYDVPDYAGSGSGSAEVQLVVSGGGLVKPGGSMILSCAASGFTFSNYSMNWVRQAPGKGLEWVSSISSSSEYIYYADFVKGRFTISRDNAKNSLYLQMDSLRAEDTAVYYCAWPGYRKAWGRGTLVTVSSGGGGSGGGGSGGGGSQSVLTQPASVSGSPGQSITISCAGTSSDVGGYNYVSWYQQHPGKAPKLMIYEDSKRPSGVSNRFSGSKSGNTASLTISGLRAEDEADYYCSYCASKGHWLFGGGTKLAVLGAAAEQKLISGSGSGSGSGSNPYLRLKVRRDHIIDDALVRLEMIAMENPADLKKQLYVEFEGEQGVDEGGVSKEFFQLVVEEIFNPDIGMFTYDESTKLFWFNPSSFETEGQFTLIGIVLGLAIYNNCILDVHFPMVVYRKLMGKKGTFRDLGDSHPVLYQSLKDLLEYEGNVEDDMMITFQISQTDLFGNPMMYDLKENGDKIPITNENRKEFVNLYSDYILNKSVEKQFKAFRRGFHMVTNESPLKYLFRPEEIELLICGSRNLDFQALEETTEYDGGYTRDSVLIREFWEIVHSFTDEQKRLFLQFTTGTDRAPVGGLGKLKMIIAKNGPDTERLPTSHTCFNVLLLPEYSSKEKLKERLLKAITYAKGFGML

SEQ ID NO: 683 - protein, 635 aa, synthetic construct
  source 1..635: note = HA-INT41-(GS)6-E6AP peptide
MYPYDVPDYAGSGSGSAEVQLVVSGGGLVKPGGSMILSCAASGFTFSNYSMNWVRQAPGKGLEWVSSISSSSEYIYYADFVKGRFTISRDNAKNSLYLQMDSLRAEDTAVYYCAWPGYRKAWGRGTLVTVSSGGGGSGGGGSGGGGSQSVLTQPASVSGSPGQSITISCAGTSSDVGGYNYVSWYQQHPGKAPKLMIYEDSKRPSGVSNRFSGSKSGNTASLTISGLRAEDEADYYCSYCASKGHWLFGGGTKLAVLGAAAEQKLISGSGSGSGSGSGSNPYLRLKVRRDHIIDDALVRLEMIAMENPADLKKQLYVEFEGEQGVDEGGVSKEFFQLVVEEIFNPDIGMFTYDESTKLFWFNPSSFETEGQFTLIGIVLGLAIYNNCILDVHFPMVVYRKLMGKKGTFRDLGDSHPVLYQSLKDLLEYEGNVEDDMMITFQISQTDLFGNPMMYDLKENGDKIPITNENRKEFVNLYSDYILNKSVEKQFKAFRRGFHMVTNESPLKYLFRPEEIELLICGSRNLDFQALEETTEYDGGYTRDSVLIREFWEIVHSFTDEQKRLFLQFTTGTDRAPVGGLGKLKMIIAKNGPDTERLPTSHTCFNVLLLPEYSSKEKLKERLLKAITYAKGFGML

SEQ ID NO: 684 - protein, 540 aa, synthetic construct
  source 1..540: note = FBXW7b-(GS)1-INT41 peptide
CVPRSGLILSCICLYCGVLLPVLLPNLPFLTCLSMSTLESVTYLPEKGLYCQRLPSSRTHGGTESLKGKNTENMGFYGTLKMIFYKMKRKLDHGSEVRSFSLGKKPCKVSEYTSTTGLVPCSATPTTFGDLRAANGQGQQRRRITSVQPPTGLQEWLKMFQSWSGPEKLLALDELIDSCEPTQVKHMMQVIEPQFQRDFISLLPKELALYVLSFLEPKDLLQAAQTCRYWRILAEDNLLWREKCKEEGIDEPLHIKRRKVIKPGFIHSPWKSAYIRQHRIDTNSRRGGSAEVQLVVSGGGLVKPGGSMILSCAASGFTFSNYSMNWVRQAPGKGLEWVSSISSSSEYIYYADFVKGRFTISRDNAKNSLYLQMDSLRAEDTAVYYCAWPGYRKAWGRGTLVTVSSGGGGSGGGGSGGGGSQSVLTQPASVSGSPGQSITISCAGTSSDVGGYNYVSWYQQHPGKAPKLMIYEDSKRPSGVSNRFSGSKSGNTASLTISGLRAEDEADYYCSYCASKGHWLFGGGTKLAVLGAAAEQKLIS

SEQ ID NO: 685 - protein, 542 aa, synthetic construct
  source 1..542: note = FBXW7b-(GS)2-INT41 peptide
CVPRSGLILSCICLYCGVLLPVLLPNLPFLTCLSMSTLESVTYLPEKGLYCQRLPSSRTHGGTESLKGKNTENMGFYGTLKMIFYKMKRKLDHGSEVRSFSLGKKPCKVSEYTSTTGLVPCSATPTTFGDLRAANGQGQQRRRITSVQPPTGLQEWLKMFQSWSGPEKLLALDELIDSCEPTQVKHMMQVIEPQFQRDFISLLPKELALYVLSFLEPKDLLQAAQTCRYWRILAEDNLLWREKCKEEGIDEPLHIKRRKVIKPGFIHSPWKSAYIRQHRIDTNSRRGGSGSAEVQLVVSGGGLVKPGGSMILSCAASGFTFSNYSMNWVRQAPGKGLEWVSSISSSSEYIYYADFVKGRFTISRDNAKNSLYLQMDSLRAEDTAVYYCAWPGYRKAWGRGTLVTVSSGGGGSGGGGSGGGGSQSVLTQPASVSGSPGQSITISCAGTSSDVGGYNYVSWYQQHPGKAPKLMIYEDSKRPSGVSNRFSGSKSGNTASLTISGLRAEDEADYYCSYCASKGHWLFGGGTKLAVLGAAAEQKLIS

SEQ ID NO: 686 - protein, 544 aa, synthetic construct
  source 1..544: note = FBXW7b-(GS)3-INT41 peptide
CVPRSGLILSCICLYCGVLLPVLLPNLPFLTCLSMSTLESVTYLPEKGLYCQRLPSSRTHGGTESLKGKNTENMGFYGTLKMIFYKMKRKLDHGSEVRSFSLGKKPCKVSEYTSTTGLVPCSATPTTFGDLRAANGQGQQRRRITSVQPPTGLQEWLKMFQSWSGPEKLLALDELIDSCEPTQVKHMMQVIEPQFQRDFISLLPKELALYVLSFLEPKDLLQAAQTCRYWRILAEDNLLWREKCKEEGIDEPLHIKRRKVIKPGFIHSPWKSAYIRQHRIDTNSRRGGSGSGSAEVQLVVSGGGLVKPGGSMILSCAASGFTFSNYSMNWVRQAPGKGLEWVSSISSSSEYIYYADFVKGRFTISRDNAKNSLYLQMDSLRAEDTAVYYCAWPGYRKAWGRGTLVTVSSGGGGSGGGGSGGGGSQSVLTQPASVSGSPGQSITISCAGTSSDVGGYNYVSWYQQHPGKAPKLMIYEDSKRPSGVSNRFSGSKSGNTASLTISGLRAEDEADYYCSYCASKGHWLFGGGTKLAVLGAAAEQKLIS

SEQ ID NO: 687 - protein, 546 aa, synthetic construct
  source 1..546: note = FBXW7b-(GS)4-INT41 peptide
CVPRSGLILSCICLYCGVLLPVLLPNLPFLTCLSMSTLESVTYLPEKGLYCQRLPSSRTHGGTESLKGKNTENMGFYGTLKMIFYKMKRKLDHGSEVRSFSLGKKPCKVSEYTSTTGLVPCSATPTTFGDLRAANGQGQQRRRITSVQPPTGLQEWLKMFQSWSGPEKLLALDELIDSCEPTQVKHMMQVIEPQFQRDFISLLPKELALYVLSFLEPKDLLQAAQTCRYWRILAEDNLLWREKCKEEGIDEPLHIKRRKVIKPGFIHSPWKSAYIRQHRIDTNSRRGGSGSGSGSAEVQLVVSGGGLVKPGGSMILSCAASGFTFSNYSMNWVRQAPGKGLEWVSSISSSSEYIYYADFVKGRFTISRDNAKNSLYLQMDSLRAEDTAVYYCAWPGYRKAWGRGTLVTVSSGGGGSGGGGSGGGGSQSVLTQPASVSGSPGQSITISCAGTSSDVGGYNYVSWYQQHPGKAPKLMIYEDSKRPSGVSNRFSGSKSGNTASLTISGLRAEDEADYYCSYCASKGHWLFGGGTKLAVLGAAAEQKLIS

SEQ ID NO: 688 - protein, 548 aa, synthetic construct
  source 1..548: note = FBXW7b-(GS)5-INT41 peptide
CVPRSGLILSCICLYCGVLLPVLLPNLPFLTCLSMSTLESVTYLPEKGLYCQRLPSSRTHGGTESLKGKNTENMGFYGTLKMIFYKMKRKLDHGSEVRSFSLGKKPCKVSEYTSTTGLVPCSATPTTFGDLRAANGQGQQRRRITSVQPPTGLQEWLKMFQSWSGPEKLLALDELIDSCEPTQVKHMMQVIEPQFQRDFISLLPKELALYVLSFLEPKDLLQAAQTCRYWRILAEDNLLWREKCKEEGIDEPLHIKRRKVIKPGFIHSPWKSAYIRQHRIDTNSRRGGSGSGSGSGSAEVQLVVSGGGLVKPGGSMILSCAASGFTFSNYSMNWVRQAPGKGLEWVSSISSSSEYIYYADFVKGRFTISRDNAKNSLYLQMDSLRAEDTAVYYCAWPGYRKAWGRGTLVTVSSGGGGSGGGGSGGGGSQSVLTQPASVSGSPGQSITISCAGTSSDVGGYNYVSWYQQHPGKAPKLMIYEDSKRPSGVSNRFSGSKSGNTASLTISGLRAEDEADYYCSYCASKGHWLFGGGTKLAVLGAAAEQKLIS

SEQ ID NO: 689 - protein, 550 aa, synthetic construct
  source 1..550: note = FBXW7b-(GS)6-INT41 peptide
CVPRSGLILSCICLYCGVLLPVLLPNLPFLTCLSMSTLESVTYLPEKGLYCQRLPSSRTHGGTESLKGKNTENMGFYGTLKMIFYKMKRKLDHGSEVRSFSLGKKPCKVSEYTSTTGLVPCSATPTTFGDLRAANGQGQQRRRITSVQPPTGLQEWLKMFQSWSGPEKLLALDELIDSCEPTQVKHMMQVIEPQFQRDFISLLPKELALYVLSFLEPKDLLQAAQTCRYWRILAEDNLLWREKCKEEGIDEPLHIKRRKVIKPGFIHSPWKSAYIRQHRIDTNSRRGGSGSGSGSGSGSAEVQLVVSGGGLVKPGGSMILSCAASGFTFSNYSMNWVRQAPGKGLEWVSSISSSSEYIYYADFVKGRFTISRDNAKNSLYLQMDSLRAEDTAVYYCAWPGYRKAWGRGTLVTVSSGGGGSGGGGSGGGGSQSVLTQPASVSGSPGQSITISCAGTSSDVGGYNYVSWYQQHPGKAPKLMIYEDSKRPSGVSNRFSGSKSGNTASLTISGLRAEDEADYYCSYCASKGHWLFGGGTKLAVLGAAAEQKLIS

SEQ ID NO: 690 - protein, 550 aa, synthetic construct
  source 1..550: note = HA-FBXW7b-(GS)1-INT41 peptide
MYPYDVPDYACVPRSGLILSCICLYCGVLLPVLLPNLPFLTCLSMSTLESVTYLPEKGLYCQRLPSSRTHGGTESLKGKNTENMGFYGTLKMIFYKMKRKLDHGSEVRSFSLGKKPCKVSEYTSTTGLVPCSATPTTFGDLRAANGQGQQRRRITSVQPPTGLQEWLKMFQSWSGPEKLLALDELIDSCEPTQVKHMMQVIEPQFQRDFISLLPKELALYVLSFLEPKDLLQAAQTCRYWRILAEDNLLWREKCKEEGIDEPLHIKRRKVIKPGFIHSPWKSAYIRQHRIDTNSRRGGSAEVQLVVSGGGLVKPGGSMILSCAASGFTFSNYSMNWVRQAPGKGLEWVSSISSSSEYIYYADFVKGRFTISRDNAKNSLYLQMDSLRAEDTAVYYCAWPGYRKAWGRGTLVTVSSGGGGSGGGGSGGGGSQSVLTQPASVSGSPGQSITISCAGTSSDVGGYNYVSWYQQHPGKAPKLMIYEDSKRPSGVSNRFSGSKSGNTASLTISGLRAEDEADYYCSYCASKGHWLFGGGTKLAVLGAAAEQKLIS

SEQ ID NO: 691 - protein, 552 aa, synthetic construct
  source 1..552: note = HA-FBXW7b-(GS)2-INT41 peptide
MYPYDVPDYACVPRSGLILSCICLYCGVLLPVLLPNLPFLTCLSMSTLESVTYLPEKGLYCQRLPSSRTHGGTESLKGKNTENMGFYGTLKMIFYKMKRKLDHGSEVRSFSLGKKPCKVSEYTSTTGLVPCSATPTTFGDLRAANGQGQQRRRITSVQPPTGLQEWLKMFQSWSGPEKLLALDELIDSCEPTQVKHMMQVIEPQFQRDFISLLPKELALYVLSFLEPKDLLQAAQTCRYWRILAEDNLLWREKCKEEGIDEPLHIKRRKVIKPGFIHSPWKSAYIRQHRIDTNSRRGGSGSAEVQLVVSGGGLVKPGGSMILSCAASGFTFSNYSMNWVRQAPGKGLEWVSSISSSSEYIYYADFVKGRFTISRDNAKNSLYLQMDSLRAEDTAVYYCAWPGYRKAWGRGTLVTVSSGGGGSGGGGSGGGGSQSVLTQPASVSGSPGQSITISCAGTSSDVGGYNYVSWYQQHPGKAPKLMIYEDSKRPSGVSNRFSGSKSGNTASLTISGLRAEDEADYYCSYCASKGHWLFGGGTKLAVLGAAAEQKLIS

SEQ ID NO: 692 - protein, 554 aa, synthetic construct
  source 1..554: note = HA-FBXW7b-(GS)3-INT41 peptide
MYPYDVPDYACVPRSGLILSCICLYCGVLLPVLLPNLPFLTCLSMSTLESVTYLPEKGLYCQRLPSSRTHGGTESLKGKNTENMGFYGTLKMIFYKMKRKLDHGSEVRSFSLGKKPCKVSEYTSTTGLVPCSATPTTFGDLRAANGQGQQRRRITSVQPPTGLQEWLKMFQSWSGPEKLLALDELIDSCEPTQVKHMMQVIEPQFQRDFISLLPKELALYVLSFLEPKDLLQAAQTCRYWRILAEDNLLWREKCKEEGIDEPLHIKRRKVIKPGFIHSPWKSAYIRQHRIDTNSRRGGSGSGSAEVQLVVSGGGLVKPGGSMILSCAASGFTFSNYSMNWVRQAPGKGLEWVSSISSSSEYIYYADFVKGRFTISRDNAKNSLYLQMDSLRAEDTAVYYCAWPGYRKAWGRGTLVTVSSGGGGSGGGGSGGGGSQSVLTQPASVSGSPGQSITISCAGTSSDVGGYNYVSWYQQHPGKAPKLMIYEDSKRPSGVSNRFSGSKSGNTASLTISGLRAEDEADYYCSYCASKGHWLFGGGTKLAVLGAAAEQKLIS

SEQ ID NO: 693 - protein, 556 aa, synthetic construct
  source 1..556: note = HA-FBXW7b-(GS)4-INT41 peptide
MYPYDVPDYACVPRSGLILSCICLYCGVLLPVLLPNLPFLTCLSMSTLESVTYLPEKGLYCQRLPSSRTHGGTESLKGKNTENMGFYGTLKMIFYKMKRKLDHGSEVRSFSLGKKPCKVSEYTSTTGLVPCSATPTTFGDLRAANGQGQQRRRITSVQPPTGLQEWLKMFQSWSGPEKLLALDELIDSCEPTQVKHMMQVIEPQFQRDFISLLPKELALYVLSFLEPKDLLQAAQTCRYWRILAEDNLLWREKCKEEGIDEPLHIKRRKVIKPGFIHSPWKSAYIRQHRIDTNSRRGGSGSGSGSAEVQLVVSGGGLVKPGGSMILSCAASGFTFSNYSMNWVRQAPGKGLEWVSSISSSSEYIYYADFVKGRFTISRDNAKNSLYLQMDSLRAEDTAVYYCAWPGYRKAWGRGTLVTVSSGGGGSGGGGSGGGGSQSVLTQPASVSGSPGQSITISCAGTSSDVGGYNYVSWYQQHPGKAPKLMIYEDSKRPSGVSNRFSGSKSGNTASLTISGLRAEDEADYYCSYCASKGHWLFGGGTKLAVLGAAAEQKLIS

SEQ ID NO: 694 - protein, 558 aa, synthetic construct
  source 1..558: note = HA-FBXW7b-(GS)5-INT41 peptide
MYPYDVPDYACVPRSGLILSCICLYCGVLLPVLLPNLPFLTCLSMSTLESVTYLPEKGLYCQRLPSSRTHGGTESLKGKNTENMGFYGTLKMIFYKMKRKLDHGSEVRSFSLGKKPCKVSEYTSTTGLVPCSATPTTFGDLRAANGQGQQRRRITSVQPPTGLQEWLKMFQSWSGPEKLLALDELIDSCEPTQVKHMMQVIEPQFQRDFISLLPKELALYVLSFLEPKDLLQAAQTCRYWRILAEDNLLWREKCKEEGIDEPLHIKRRKVIKPGFIHSPWKSAYIRQHRIDTNSRRGGSGSGSGSGSAEVQLVVSGGGLVKPGGSMILSCAASGFTFSNYSMNWVRQAPGKGLEWVSSISSSSEYIYYADFVKGRFTISRDNAKNSLYLQMDSLRAEDTAVYYCAWPGYRKAWGRGTLVTVSSGGGGSGGGGSGGGGSQSVLTQPASVSGSPGQSITISCAGTSSDVGGYNYVSWYQQHPGKAPKLMIYEDSKRPSGVSNRFSGSKSGNTASLTISGLRAEDEADYYCSYCASKGHWLFGGGTKLAVLGAAAEQKLIS

SEQ ID NO: 695 - protein, 560 aa, synthetic construct
  source 1..560: note = HA-FBXW7b-(GS)6-INT41 peptide
MYPYDVPDYACVPRSGLILSCICLYCGVLLPVLLPNLPFLTCLSMSTLESVTYLPEKGLYCQRLPSSRTHGGTESLKGKNTENMGFYGTLKMIFYKMKRKLDHGSEVRSFSLGKKPCKVSEYTSTTGLVPCSATPTTFGDLRAANGQGQQRRRITSVQPPTGLQEWLKMFQSWSGPEKLLALDELIDSCEPTQVKHMMQVIEPQFQRDFISLLPKELALYVLSFLEPKDLLQAAQTCRYWRILAEDNLLWREKCKEEGIDEPLHIKRRKVIKPGFIHSPWKSAYIRQHRIDTNSRRGGSGSGSGSGSGSAEVQLVVSGGGLVKPGGSMILSCAASGFTFSNYSMNWVRQAPGKGLEWVSSISSSSEYIYYADFVKGRFTISRDNAKNSLYLQMDSLRAEDTAVYYCAWPGYRKAWGRGTLVTVSSGGGGSGGGGSGGGGSQSVLTQPASVSGSPGQSITISCAGTSSDVGGYNYVSWYQQHPGKAPKLMIYEDSKRPSGVSNRFSGSKSGNTASLTISGLRAEDEADYYCSYCASKGHWLFGGGTKLAVLGAAAEQKLIS

SEQ ID NO: 696 - protein, 574 aa, synthetic construct
  source 1..574: note = Keap1-(GS)1-INT41 peptide
QPDPRPSGAGACCRFLPLQSQCPEGAGDAVMYASTECKAEVTPSQHGNRTFSYTLEDHTKQAFGIMNELRLSQQLCDVTLQVKYQDAPAAQFMAHKVVLASSSPVFKAMFTNGLREQGMEVVSIEGIHPKVMERLIEFAYTASISMGEKCVLHVMNGAVMYQIDSVVRACSDFLVQQLDPSNAIGIANFAEQIGCVELHQRAREYIYMHFGEVAKQEEFFNLSHCQLVTLISRDDLNVRCESEVFHACINWVKYDCEQRRFYVQALLRAVRCHSLTPNFLQMQLQKCEILQSDSRCKDYLVKIFEELTLHKPTQVMPCRAPGSAEVQLVVSGGGLVKPGGSMILSCAASGFTFSNYSMNWVRQAPGKGLEWVSSISSSSEYIYYADFVKGRFTISRDNAKNSLYLQMDSLRAEDTAVYYCAWPGYRKAWGRGTLVTVSSGGGGSGGGGSGGGGSQSVLTQPASVSGSPGQSITISCAGTSSDVGGYNYVSWYQQHPGKAPKLMIYEDSKRPSGVSNRFSGSKSGNTASLTISGLRAEDEADYYCSYCASKGHWLFGGGTKLAVLGAAAEQKLIS

SEQ ID NO: 697 - protein, 576 aa, synthetic construct
  source 1..576: note = Keap1-(GS)2-INT41 peptide
QPDPRPSGAGACCRFLPLQSQCPEGAGDAVMYASTECKAEVTPSQHGNRTFSYTLEDHTKQAFGIMNELRLSQQLCDVTLQVKYQDAPAAQFMAHKVVLASSSPVFKAMFTNGLREQGMEVVSIEGIHPKVMERLIEFAYTASISMGEKCVLHVMNGAVMYQIDSVVRACSDFLVQQLDPSNAIGIANFAEQIGCVELHQRAREYIYMHFGEVAKQEEFFNLSHCQLVTLISRDDLNVRCESEVFHACINWVKYDCEQRRFYVQALLRAVRCHSLTPNFLQMQLQKCEILQSDSRCKDYLVKIFEELTLHKPTQVMPCRAPGSGSAEVQLVVSGGGLVKPGGSMILSCAASGFTFSNYSMNWVRQAPGKGLEWVSSISSSSEYIYYADFVKGRFTISRDNAKNSLYLQMDSLRAEDTAVYYCAWPGYRKAWGRGTLVTVSSGGGGSGGGGSGGGGSQSVLTQPASVSGSPGQSITISCAGTSSDVGGYNYVSWYQQHPGKAPKLMIYEDSKRPSGVSNRFSGSKSGNTASLTISGLRAEDEADYYCSYCASKGHWLFGGGTKLAVLGAAAEQKLIS

SEQ ID NO: 698 - protein, 578 aa, synthetic construct
  source 1..578: note = Keap1-(GS)3-INT41 peptide
QPDPRPSGAGACCRFLPLQSQCPEGAGDAVMYASTECKAEVTPSQHGNRTFSYTLEDHTKQAFGIMNELRLSQQLCDVTLQVKYQDAPAAQFMAHKVVLASSSPVFKAMFTNGLREQGMEVVSIEGIHPKVMERLIEFAYTASISMGEKCVLHVMNGAVMYQIDSVVRACSDFLVQQLDPSNAIGIANFAEQIGCVELHQRAREYIYMHFGEVAKQEEFFNLSHCQLVTLISRDDLNVRCESEVFHACINWVKYDCEQRRFYVQALLRAVRCHSLTPNFLQMQLQKCEILQSDSRCKDYLVKIFEELTLHKPTQVMPCRAPGSGSGSAEVQLVVSGGGLVKPGGSMILSCAASGFTFSNYSMNWVRQAPGKGLEWVSSISSSSEYIYYADFVKGRFTISRDNAKNSLYLQMDSLRAEDTAVYYCAWPGYRKAWGRGTLVTVSSGGGGSGGGGSGGGGSQSVLTQPASVSGSPGQSITISCAGTSSDVGGYNYVSWYQQHPGKAPKLMIYEDSKRPSGVSNRFSGSKSGNTASLTISGLRAEDEADYYCSYCASKGHWLFGGGTKLAVLGAAAEQKLIS

SEQ ID NO: 699 - protein, 580 aa, synthetic construct
  source 1..580: note = Keap1-(GS)4-INT41 peptide
QPDPRPSGAGACCRFLPLQSQCPEGAGDAVMYASTECKAEVTPSQHGNRTFSYTLEDHTKQAFGIMNELRLSQQLCDVTLQVKYQDAPAAQFMAHKVVLASSSPVFKAMFTNGLREQGMEVVSIEGIHPKVMERLIEFAYTASISMGEKCVLHVMNGAVMYQIDSVVRACSDFLVQQLDPSNAIGIANFAEQIGCVELHQRAREYIYMHFGEVAKQEEFFNLSHCQLVTLISRDDLNVRCESEVFHACINWVKYDCEQRRFYVQALLRAVRCHSLTPNFLQMQLQKCEILQSDSRCKDYLVKIFEELTLHKPTQVMPCRAPGSGSGSGSAEVQLVVSGGGLVKPGGSMILSCAASGFTFSNYSMNWVRQAPGKGLEWVSSISSSSEYIYYADFVKGRFTISRDNAKNSLYLQMDSLRAEDTAVYYCAWPGYRKAWGRGTLVTVSSGGGGSGGGGSGGGGSQSVLTQPASVSGSPGQSITISCAGTSSDVGGYNYVSWYQQHPGKAPKLMIYEDSKRPSGVSNRFSGSKSGNTASLTISGLRAEDEADYYCSYCASKGHWLFGGGTKLAVLGAAAEQKLIS

SEQ ID NO: 700 - protein, 582 aa, synthetic construct
  source 1..582: note = Keap1-(GS)5-INT41 peptide
QPDPRPSGAGACCRFLPLQSQCPEGAGDAVMYASTECKAEVTPSQHGNRTFSYTLEDHTKQAFGIMNELRLSQQLCDVTLQVKYQDAPAAQFMAHKVVLASSSPVFKAMFTNGLREQGMEVVSIEGIHPKVMERLIEFAYTASISMGEKCVLHVMNGAVMYQIDSVVRACSDFLVQQLDPSNAIGIANFAEQIGCVELHQRAREYIYMHFGEVAKQEEFFNLSHCQLVTLISRDDLNVRCESEVFHACINWVKYDCEQRRFYVQALLRAVRCHSLTPNFLQMQLQKCEILQSDSRCKDYLVKIFEELTLHKPTQVMPCRAPGSGSGSGSGSAEVQLVVSGGGLVKPGGSMILSCAASGFTFSNYSMNWVRQAPGKGLEWVSSISSSSEYIYYADFVKGRFTISRDNAKNSLYLQMDSLRAEDTAVYYCAWPGYRKAWGRGTLVTVSSGGGGSGGGGSGGGGSQSVLTQPASVSGSPGQSITISCAGTSSDVGGYNYVSWYQQHPGKAPKLMIYEDSKRPSGVSNRFSGSKSGNTASLTISGLRAEDEADYYCSYCASKGHWLFGGGTKLAVLGAAAEQKLIS

SEQ ID NO: 701 - protein, 584 aa, synthetic construct
  source 1..584: note = Keap1-(GS)6-INT41 peptide
QPDPRPSGAGACCRFLPLQSQCPEGAGDAVMYASTECKAEVTPSQHGNRTFSYTLEDHTKQAFGIMNELRLSQQLCDVTLQVKYQDAPAAQFMAHKVVLASSSPVFKAMFTNGLREQGMEVVSIEGIHPKVMERLIEFAYTASISMGEKCVLHVMNGAVMYQIDSVVRACSDFLVQQLDPSNAIGIANFAEQIGCVELHQRAREYIYMHFGEVAKQEEFFNLSHCQLVTLISRDDLNVRCESEVFHACINWVKYDCEQRRFYVQALLRAVRCHSLTPNFLQMQLQKCEILQSDSRCKDYLVKIFEELTLHKPTQVMPCRAPGSGSGSGSGSGSAEVQLVVSGGGLVKPGGSMILSCAASGFTFSNYSMNWVRQAPGKGLEWVSSISSSSEYIYYADFVKGRFTISRDNAKNSLYLQMDSLRAEDTAVYYCAWPGYRKAWGRGTLVTVSSGGGGSGGGGSGGGGSQSVLTQPASVSGSPGQSITISCAGTSSDVGGYNYVSWYQQHPGKAPKLMIYEDSKRPSGVSNRFSGSKSGNTASLTISGLRAEDEADYYCSYCASKGHWLFGGGTKLAVLGAAAEQKLIS

SEQ ID NO: 702 - protein, 590 aa, synthetic construct
  source 1..590: note = HA-Keap1-(GS)1-INT41 peptide
MYPYDVPDYAGSGSGSQPDPRPSGAGACCRFLPLQSQCPEGAGDAVMYASTECKAEVTPSQHGNRTFSYTLEDHTKQAFGIMNELRLSQQLCDVTLQVKYQDAPAAQFMAHKVVLASSSPVFKAMFTNGLREQGMEVVSIEGIHPKVMERLIEFAYTASISMGEKCVLHVMNGAVMYQIDSVVRACSDFLVQQLDPSNAIGIANFAEQIGCVELHQRAREYIYMHFGEVAKQEEFFNLSHCQLVTLISRDDLNVRCESEVFHACINWVKYDCEQRRFYVQALLRAVRCHSLTPNFLQMQLQKCEILQSDSRCKDYLVKIFEELTLHKPTQVMPCRAPGSAEVQLVVSGGGLVKPGGSMILSCAASGFTFSNYSMNWVRQAPGKGLEWVSSISSSSEYIYYADFVKGRFTISRDNAKNSLYLQMDSLRAEDTAVYYCAWPGYRKAWGRGTLVTVSSGGGGSGGGGSGGGGSQSVLTQPASVSGSPGQSITISCAGTSSDVGGYNYVSWYQQHPGKAPKLMIYEDSKRPSGVSNRFSGSKSGNTASLTISGLRAEDEADYYCSYCASKGHWLFGGGTKLAVLGAAAEQKLIS

SEQ ID NO: 703 - protein, 592 aa, synthetic construct
  source 1..592: note = HA-Keap1-(GS)2-INT41 peptide
MYPYDVPDYAGSGSGSQPDPRPSGAGACCRFLPLQSQCPEGAGDAVMYASTECKAEVTPSQHGNRTFSYTLEDHTKQAFGIMNELRLSQQLCDVTLQVKYQDAPAAQFMAHKVVLASSSPVFKAMFTNGLREQGMEVVSIEGIHPKVMERLIEFAYTASISMGEKCVLHVMNGAVMYQIDSVVRACSDFLVQQLDPSNAIGIANFAEQIGCVELHQRAREYIYMHFGEVAKQEEFFNLSHCQLVTLISRDDLNVRCESEVFHACINWVKYDCEQRRFYVQALLRAVRCHSLTPNFLQMQLQKCEILQSDSRCKDYLVKIFEELTLHKPTQVMPCRAPGSGSAEVQLVVSGGGLVKPGGSMILSCAASGFTFSNYSMNWVRQAPGKGLEWVSSISSSSEYIYYADFVKGRFTISRDNAKNSLYLQMDSLRAEDTAVYYCAWPGYRKAWGRGTLVTVSSGGGGSGGGGSGGGGSQSVLTQPASVSGSPGQSITISCAGTSSDVGGYNYVSWYQQHPGKAPKLMIYEDSKRPSGVSNRFSGSKSGNTASLTISGLRAEDEADYYCSYCASKGHWLFGGGTKLAVLGAAAEQKLIS

SEQ ID NO: 704 - protein, 594 aa, synthetic construct
  source 1..594: note = HA-Keap1-(GS)3-INT41 peptide
MYPYDVPDYAGSGSGSQPDPRPSGAGACCRFLPLQSQCPEGAGDAVMYASTECKAEVTPSQHGNRTFSYTLEDHTKQAFGIMNELRLSQQLCDVTLQVKYQDAPAAQFMAHKVVLASSSPVFKAMFTNGLREQGMEVVSIEGIHPKVMERLIEFAYTASISMGEKCVLHVMNGAVMYQIDSVVRACSDFLVQQLDPSNAIGIANFAEQIGCVELHQRAREYIYMHFGEVAKQEEFFNLSHCQLVTLISRDDLNVRCESEVFHACINWVKYDCEQRRFYVQALLRAVRCHSLTPNFLQMQLQKCEILQSDSRCKDYLVKIFEELTLHKPTQVMPCRAPGSGSGSAEVQLVVSGGGLVKPGGSMILSCAASGFTFSNYSMNWVRQAPGKGLEWVSSISSSSEYIYYADFVKGRFTISRDNAKNSLYLQMDSLRAEDTAVYYCAWPGYRKAWGRGTLVTVSSGGGGSGGGGSGGGGSQSVLTQPASVSGSPGQSITISCAGTSSDVGGYNYVSWYQQHPGKAPKLMIYEDSKRPSGVSNRFSGSKSGNTASLTISGLRAEDEADYYCSYCASKGHWLFGGGTKLAVLGAAAEQKLIS

SEQ ID NO: 705 - protein, 596 aa, synthetic construct
  source 1..596: note = HA-Keap1-(GS)4-INT41 peptide
MYPYDVPDYAGSGSGSQPDPRPSGAGACCRFLPLQSQCPEGAGDAVMYASTECKAEVTPSQHGNRTFSYTLEDHTKQAFGIMNELRLSQQLCDVTLQVKYQDAPAAQFMAHKVVLASSSPVFKAMFTNGLREQGMEVVSIEGIHPKVMERLIEFAYTASISMGEKCVLHVMNGAVMYQIDSVVRACSDFLVQQLDPSNAIGIANFAEQIGCVELHQRAREYIYMHFGEVAKQEEFFNLSHCQLVTLISRDDLNVRCESEVFHACINWVKYDCEQRRFYVQALLRAVRCHSLTPNFLQMQLQKCEILQSDSRCKDYLVKIFEELTLHKPTQVMPCRAPGSGSGSGSAEVQLVVSGGGLVKPGGSMILSCAASGFTFSNYSMNWVRQAPGKGLEWVSSISSSSEYIYYADFVKGRFTISRDNAKNSLYLQMDSLRAEDTAVYYCAWPGYRKAWGRGTLVTVSSGGGGSGGGGSGGGGSQSVLTQPASVSGSPGQSITISCAGTSSDVGGYNYVSWYQQHPGKAPKLMIYEDSKRPSGVSNRFSGSKSGNTASLTISGLRAEDEADYYCSYCASKGHWLFGGGTKLAVLGAAAEQKLIS

SEQ ID NO: 706 - protein, 598 aa, synthetic construct
  source 1..598: note = HA-Keap1-(GS)5-INT41 peptide
MYPYDVPDYAGSGSGSQPDPRPSGAGACCRFLPLQSQCPEGAGDAVMYASTECKAEVTPSQHGNRTFSYTLEDHTKQAFGIMNELRLSQQLCDVTLQVKYQDAPAAQFMAHKVVLASSSPVFKAMFTNGLREQGMEVVSIEGIHPKVMERLIEFAYTASISMGEKCVLHVMNGAVMYQIDSVVRACSDFLVQQLDPSNAIGIANFAEQIGCVELHQRAREYIYMHFGEVAKQEEFFNLSHCQLVTLISRDDLNVRCESEVFHACINWVKYDCEQRRFYVQALLRAVRCHSLTPNFLQMQLQKCEILQSDSRCKDYLVKIFEELTLHKPTQVMPCRAPGSGSGSGSGSAEVQLVVSGGGLVKPGGSMILSCAASGFTFSNYSMNWVRQAPGKGLEWVSSISSSSEYIYYADFVKGRFTISRDNAKNSLYLQMDSLRAEDTAVYYCAWPGYRKAWGRGTLVTVSSGGGGSGGGGSGGGGSQSVLTQPASVSGSPGQSITISCAGTSSDVGGYNYVSWYQQHPGKAPKLMIYEDSKRPSGVSNRFSGSKSGNTASLTISGLRAEDEADYYCSYCASKGHWLFGGGTKLAVLGAAAEQKLIS

SEQ ID NO: 707 - protein, 600 aa, synthetic construct
  source 1..600: note = HA-Keap1-(GS)6-INT41 peptide
MYPYDVPDYAGSGSGSQPDPRPSGAGACCRFLPLQSQCPEGAGDAVMYASTECKAEVTPSQHGNRTFSYTLEDHTKQAFGIMNELRLSQQLCDVTLQVKYQDAPAAQFMAHKVVLASSSPVFKAMFTNGLREQGMEVVSIEGIHPKVMERLIEFAYTASISMGEKCVLHVMNGAVMYQIDSVVRACSDFLVQQLDPSNAIGIANFAEQIGCVELHQRAREYIYMHFGEVAKQEEFFNLSHCQLVTLISRDDLNVRCESEVFHACINWVKYDCEQRRFYVQALLRAVRCHSLTPNFLQMQLQKCEILQSDSRCKDYLVKIFEELTLHKPTQVMPCRAPGSGSGSGSGSGSAEVQLVVSGGGLVKPGGSMILSCAASGFTFSNYSMNWVRQAPGKGLEWVSSISSSSEYIYYADFVKGRFTISRDNAKNSLYLQMDSLRAEDTAVYYCAWPGYRKAWGRGTLVTVSSGGGGSGGGGSGGGGSQSVLTQPASVSGSPGQSITISCAGTSSDVGGYNYVSWYQQHPGKAPKLMIYEDSKRPSGVSNRFSGSKSGNTASLTISGLRAEDEADYYCSYCASKGHWLFGGGTKLAVLGAAAEQKLIS

SEQ ID NO: 708 - protein, 380 aa, synthetic construct
  source 1..380: note = RNF125-(GS)1-INT41 peptide
GSVLSTDSGKSAPASATARALERRRDPELPVTSFDCAVCLEVLHQPVRTRCGHVFCRSCIATSLKNNKWTCPYCRAYLPSEGVPATDVAKRMKSEYKNCAECDTLVCLSEMRAHIRTCQKYIDKYGPGSAEVQLVVSGGGLVKPGGSMILSCAASGFTFSNYSMNWVRQAPGKGLEWVSSISSSSEYIYYADFVKGRFTISRDNAKNSLYLQMDSLRAEDTAVYYCAWPGYRKAWGRGTLVTVSSGGGGSGGGGSGGGGSQSVLTQPASVSGSPGQSITISCAGTSSDVGGYNYVSWYQQHPGKAPKLMIYEDSKRPSGVSNRFSGSKSGNTASLTISGLRAEDEADYYCSYCASKGHWLFGGGTKLAVLGAAAEQKLIS

SEQ ID NO: 709 - protein, 382 aa, synthetic construct
  source 1..382: note = RNF125-(GS)2-INT41 peptide
GSVLSTDSGKSAPASATARALERRRDPELPVTSFDCAVCLEVLHQPVRTRCGHVFCRSCIATSLKNNKWTCPYCRAYLPSEGVPATDVAKRMKSEYKNCAECDTLVCLSEMRAHIRTCQKYIDKYGPGSGSAEVQLVVSGGGLVKPGGSMILSCAASGFTFSNYSMNWVRQAPGKGLEWVSSISSSSEYIYYADFVKGRFTISRDNAKNSLYLQMDSLRAEDTAVYYCAWPGYRKAWGRGTLVTVSSGGGGSGGGGSGGGGSQSVLTQPASVSGSPGQSITISCAGTSSDVGGYNYVSWYQQHPGKAPKLMIYEDSKRPSGVSNRFSGSKSGNTASLTISGLRAEDEADYYCSYCASKGHWLFGGGTKLAVLGAAAEQKLIS

SEQ ID NO: 710 - protein, 384 aa, synthetic construct
  source 1..384: note = RNF125-(GS)3-INT41 peptide
GSVLSTDSGKSAPASATARALERRRDPELPVTSFDCAVCLEVLHQPVRTRCGHVFCRSCIATSLKNNKWTCPYCRAYLPSEGVPATDVAKRMKSEYKNCAECDTLVCLSEMRAHIRTCQKYIDKYGPGSGSGSAEVQLVVSGGGLVKPGGSMILSCAASGFTFSNYSMNWVRQAPGKGLEWVSSISSSSEYIYYADFVKGRFTISRDNAKNSLYLQMDSLRAEDTAVYYCAWPGYRKAWGRGTLVTVSSGGGGSGGGGSGGGGSQSVLTQPASVSGSPGQSITISCAGTSSDVGGYNYVSWYQQHPGKAPKLMIYEDSKRPSGVSNRFSGSKSGNTASLTISGLRAEDEADYYCSYCASKGHWLFGGGTKLAVLGAAAEQKLIS

SEQ ID NO: 711 - protein, 386 aa, synthetic construct
  source 1..386: note = RNF125-(GS)4-INT41 peptide
GSVLSTDSGKSAPASATARALERRRDPELPVTSFDCAVCLEVLHQPVRTRCGHVFCRSCIATSLKNNKWTCPYCRAYLPSEGVPATDVAKRMKSEYKNCAECDTLVCLSEMRAHIRTCQKYIDKYGPGSGSGSGSAEVQLVVSGGGLVKPGGSMILSCAASGFTFSNYSMNWVRQAPGKGLEWVSSISSSSEYIYYADFVKGRFTISRDNAKNSLYLQMDSLRAEDTAVYYCAWPGYRKAWGRGTLVTVSSGGGGSGGGGSGGGGSQSVLTQPASVSGSPGQSITISCAGTSSDVGGYNYVSWYQQHPGKAPKLMIYEDSKRPSGVSNRFSGSKSGNTASLTISGLRAEDEADYYCSYCASKGHWLFGGGTKLAVLGAAAEQKLIS

SEQ ID NO: 712 - protein, 388 aa, synthetic construct
  source 1..388: note = RNF125-(GS)5-INT41 peptide
GSVLSTDSGKSAPASATARALERRRDPELPVTSFDCAVCLEVLHQPVRTRCGHVFCRSCIATSLKNNKWTCPYCRAYLPSEGVPATDVAKRMKSEYKNCAECDTLVCLSEMRAHIRTCQKYIDKYGPGSGSGSGSGSAEVQLVVSGGGLVKPGGSMILSCAASGFTFSNYSMNWVRQAPGKGLEWVSSISSSSEYIYYADFVKGRFTISRDNAKNSLYLQMDSLRAEDTAVYYCAWPGYRKAWGRGTLVTVSSGGGGSGGGGSGGGGSQSVLTQPASVSGSPGQSITISCAGTSSDVGGYNYVSWYQQHPGKAPKLMIYEDSKRPSGVSNRFSGSKSGNTASLTISGLRAEDEADYYCSYCASKGHWLFGGGTKLAVLGAAAEQKLIS

SEQ ID NO: 713 - protein, 390 aa, synthetic construct
  source 1..390: note = RNF125-(GS)6-INT41 peptide
GSVLSTDSGKSAPASATARALERRRDPELPVTSFDCAVCLEVLHQPVRTRCGHVFCRSCIATSLKNNKWTCPYCRAYLPSEGVPATDVAKRMKSEYKNCAECDTLVCLSEMRAHIRTCQKYIDKYGPGSGSGSGSGSGSAEVQLVVSGGGLVKPGGSMILSCAASGFTFSNYSMNWVRQAPGKGLEWVSSISSSSEYIYYADFVKGRFTISRDNAKNSLYLQMDSLRAEDTAVYYCAWPGYRKAWGRGTLVTVSSGGGGSGGGGSGGGGSQSVLTQPASVSGSPGQSITISCAGTSSDVGGYNYVSWYQQHPGKAPKLMIYEDSKRPSGVSNRFSGSKSGNTASLTISGLRAEDEADYYCSYCASKGHWLFGGGTKLAVLGAAAEQKLIS

SEQ ID NO: 714 - protein, 396 aa, synthetic construct
  source 1..396: note = HA-RNF125-(GS)1-INT41 peptide
MYPYDVPDYAGSGSGSGSVLSTDSGKSAPASATARALERRRDPELPVTSFDCAVCLEVLHQPVRTRCGHVFCRSCIATSLKNNKWTCPYCRAYLPSEGVPATDVAKRMKSEYKNCAECDTLVCLSEMRAHIRTCQKYIDKYGPGSAEVQLVVSGGGLVKPGGSMILSCAASGFTFSNYSMNWVRQAPGKGLEWVSSISSSSEYIYYADFVKGRFTISRDNAKNSLYLQMDSLRAEDTAVYYCAWPGYRKAWGRGTLVTVSSGGGGSGGGGSGGGGSQSVLTQPASVSGSPGQSITISCAGTSSDVGGYNYVSWYQQHPGKAPKLMIYEDSKRPSGVSNRFSGSKSGNTASLTISGLRAEDEADYYCSYCASKGHWLFGGGTKLAVLGAAAEQKLIS

SEQ ID NO: 715 - protein, 398 aa, synthetic construct
  source 1..398: note = HA-RNF125-(GS)2-INT41 peptide
MYPYDVPDYAGSGSGSGSVLSTDSGKSAPASATARALERRRDPELPVTSFDCAVCLEVLHQPVRTRCGHVFCRSCIATSLKNNKWTCPYCRAYLPSEGVPATDVAKRMKSEYKNCAECDTLVCLSEMRAHIRTCQKYIDKYGPGSGSAEVQLVVSGGGLVKPGGSMILSCAASGFTFSNYSMNWVRQAPGKGLEWVSSISSSSEYIYYADFVKGRFTISRDNAKNSLYLQMDSLRAEDTAVYYCAWPGYRKAWGRGTLVTVSSGGGGSGGGGSGGGGSQSVLTQPASVSGSPGQSITISCAGTSSDVGGYNYVSWYQQHPGKAPKLMIYEDSKRPSGVSNRFSGSKSGNTASLTISGLRAEDEADYYCSYCASKGHWLFGGGTKLAVLGAAAEQKLIS

SEQ ID NO: 716 - protein, 400 aa, synthetic construct
  source 1..400: note = HA-RNF125-(GS)3-INT41 peptide
MYPYDVPDYAGSGSGSGSVLSTDSGKSAPASATARALERRRDPELPVTSFDCAVCLEVLHQPVRTRCGHVFCRSCIATSLKNNKWTCPYCRAYLPSEGVPATDVAKRMKSEYKNCAECDTLVCLSEMRAHIRTCQKYIDKYGPGSGSGSAEVQLVVSGGGLVKPGGSMILSCAASGFTFSNYSMNWVRQAPGKGLEWVSSISSSSEYIYYADFVKGRFTISRDNAKNSLYLQMDSLRAEDTAVYYCAWPGYRKAWGRGTLVTVSSGGGGSGGGGSGGGGSQSVLTQPASVSGSPGQSITISCAGTSSDVGGYNYVSWYQQHPGKAPKLMIYEDSKRPSGVSNRFSGSKSGNTASLTISGLRAEDEADYYCSYCASKGHWLFGGGTKLAVLGAAAEQKLIS

SEQ ID NO: 717 - protein, 402 aa, synthetic construct
  source 1..402: note = HA-RNF125-(GS)4-INT41 peptide
MYPYDVPDYAGSGSGSGSVLSTDSGKSAPASATARALERRRDPELPVTSFDCAVCLEVLHQPVRTRCGHVFCRSCIATSLKNNKWTCPYCRAYLPSEGVPATDVAKRMKSEYKNCAECDTLVCLSEMRAHIRTCQKYIDKYGPGSGSGSGSAEVQLVVSGGGLVKPGGSMILSCAASGFTFSNYSMNWVRQAPGKGLEWVSSISSSSEYIYYADFVKGRFTISRDNAKNSLYLQMDSLRAEDTAVYYCAWPGYRKAWGRGTLVTVSSGGGGSGGGGSGGGGSQSVLTQPASVSGSPGQSITISCAGTSSDVGGYNYVSWYQQHPGKAPKLMIYEDSKRPSGVSNRFSGSKSGNTASLTISGLRAEDEADYYCSYCASKGHWLFGGGTKLAVLGAAAEQKLIS

SEQ ID NO: 718 - protein, 404 aa, synthetic construct
  source 1..404: note = HA-RNF125-(GS)5-INT41 peptide
MYPYDVPDYAGSGSGSGSVLSTDSGKSAPASATARALERRRDPELPVTSFDCAVCLEVLHQPVRTRCGHVFCRSCIATSLKNNKWTCPYCRAYLPSEGVPATDVAKRMKSEYKNCAECDTLVCLSEMRAHIRTCQKYIDKYGPGSGSGSGSGSAEVQLVVSGGGLVKPGGSMILSCAASGFTFSNYSMNWVRQAPGKGLEWVSSISSSSEYIYYADFVKGRFTISRDNAKNSLYLQMDSLRAEDTAVYYCAWPGYRKAWGRGTLVTVSSGGGGSGGGGSGGGGSQSVLTQPASVSGSPGQSITISCAGTSSDVGGYNYVSWYQQHPGKAPKLMIYEDSKRPSGVSNRFSGSKSGNTASLTISGLRAEDEADYYCSYCASKGHWLFGGGTKLAVLGAAAEQKLIS

SEQ ID NO: 719 - protein, 406 aa, synthetic construct
  source 1..406: note = HA-RNF125-(GS)6-INT41 peptide
MYPYDVPDYAGSGSGSGSVLSTDSGKSAPASATARALERRRDPELPVTSFDCAVCLEVLHQPVRTRCGHVFCRSCIATSLKNNKWTCPYCRAYLPSEGVPATDVAKRMKSEYKNCAECDTLVCLSEMRAHIRTCQKYIDKYGPGSGSGSGSGSGSAEVQLVVSGGGLVKPGGSMILSCAASGFTFSNYSMNWVRQAPGKGLEWVSSISSSSEYIYYADFVKGRFTISRDNAKNSLYLQMDSLRAEDTAVYYCAWPGYRKAWGRGTLVTVSSGGGGSGGGGSGGGGSQSVLTQPASVSGSPGQSITISCAGTSSDVGGYNYVSWYQQHPGKAPKLMIYEDSKRPSGVSNRFSGSKSGNTASLTISGLRAEDEADYYCSYCASKGHWLFGGGTKLAVLGAAAEQKLIS

SEQ ID NO: 720 - protein, 237 aa, synthetic construct
  source 1..237: note = TCF4-(GS)1-CHIP-NLS peptide
MDDLGANDELISFKDEGEQEEKSSENSSAERDLADVKSSLVNESETGSRLNFGDDIPSALRIAKKKRWNSIEERRIHQESELHSYLSRLIAAERERELEECQRNHEGDEDDSHVRAQQACIEAKHDKYMADMDELFSQVDEKRKKRDIPDYLCGKISFELMREPCITPSGITYDRKDIEEHLQRVGHFDPVTRSPLTQEQLIPNLAMKEVIDAFISENGWVEDYGSGSPAAKRVKLD

SEQ ID NO: 721 - protein, 239 aa, synthetic construct
  source 1..239: note = TCF4-(GS)2-CHIP-NLS peptide
MDDLGANDELISFKDEGEQEEKSSENSSAERDLADVKSSLVNESETGSGSRLNFGDDIPSALRIAKKKRWNSIEERRIHQESELHSYLSRLIAAERERELEECQRNHEGDEDDSHVRAQQACIEAKHDKYMADMDELFSQVDEKRKKRDIPDYLCGKISFELMREPCITPSGITYDRKDIEEHLQRVGHFDPVTRSPLTQEQLIPNLAMKEVIDAFISENGWVEDYGSGSPAAKRVKLD

SEQ ID NO: 722 - protein, 241 aa, synthetic construct
  source 1..241: note = TCF4-(GS)3-CHIP-NLS peptide
MDDLGANDELISFKDEGEQEEKSSENSSAERDLADVKSSLVNESETGSGSGSRLNFGDDIPSALRIAKKKRWNSIEERRIHQESELHSYLSRLIAAERERELEECQRNHEGDEDDSHVRAQQACIEAKHDKYMADMDELFSQVDEKRKKRDIPDYLCGKISFELMREPCITPSGITYDRKDIEEHLQRVGHFDPVTRSPLTQEQLIPNLAMKEVIDAFISENGWVEDYGSGSPAAKRVKLD

SEQ ID NO: 723 - protein, 243 aa, synthetic construct
  source 1..243: note = TCF4-(GS)4-CHIP-NLS peptide
MDDLGANDELISFKDEGEQEEKSSENSSAERDLADVKSSLVNESETGSGSGSGSRLNFGDDIPSALRIAKKKRWNSIEERRIHQESELHSYLSRLIAAERERELEECQRNHEGDEDDSHVRAQQACIEAKHDKYMADMDELFSQVDEKRKKRDIPDYLCGKISFELMREPCITPSGITYDRKDIEEHLQRVGHFDPVTRSPLTQEQLIPNLAMKEVIDAFISENGWVEDYGSGSPAAKRVKLD

SEQ ID NO: 724 - protein, 245 aa, synthetic construct
  source 1..245: note = TCF4-(GS)5-CHIP-NLS peptide
MDDLGANDELISFKDEGEQEEKSSENSSAERDLADVKSSLVNESETGSGSGSGSGSRLNFGDDIPSALRIAKKKRWNSIEERRIHQESELHSYLSRLIAAERERELEECQRNHEGDEDDSHVRAQQACIEAKHDKYMADMDELFSQVDEKRKKRDIPDYLCGKISFELMREPCITPSGITYDRKDIEEHLQRVGHFDPVTRSPLTQEQLIPNLAMKEVIDAFISENGWVEDYGSGSPAAKRVKLD

SEQ ID NO: 725 - protein, 247 aa, synthetic construct
  source 1..247: note = TCF4-(GS)6-CHIP-NLS peptide
MDDLGANDELISFKDEGEQEEKSSENSSAERDLADVKSSLVNESETGSGSGSGSGSGSRLNFGDDIPSALRIAKKKRWNSIEERRIHQESELHSYLSRLIAAERERELEECQRNHEGDEDDSHVRAQQACIEAKHDKYMADMDELFSQVDEKRKKRDIPDYLCGKISFELMREPCITPSGITYDRKDIEEHLQRVGHFDPVTRSPLTQEQLIPNLAMKEVIDAFISENGWVEDYGSGSPAAKRVKLD

SEQ ID NO: 726 - protein, 246 aa, synthetic construct
  source 1..246: note = TCF4-(GS)1-CHIP-NLS-HA peptide
MDDLGANDELISFKDEGEQEEKSSENSSAERDLADVKSSLVNESETGSRLNFGDDIPSALRIAKKKRWNSIEERRIHQESELHSYLSRLIAAERERELEECQRNHEGDEDDSHVRAQQACIEAKHDKYMADMDELFSQVDEKRKKRDIPDYLCGKISFELMREPCITPSGITYDRKDIEEHLQRVGHFDPVTRSPLTQEQLIPNLAMKEVIDAFISENGWVEDYGSGSPAAKRVKLDYPYDVPDYA

SEQ ID NO: 727 - protein, 248 aa, synthetic construct
  source 1..248: note = TCF4-(GS)2-CHIP-NLS-HA peptide
MDDLGANDELISFKDEGEQEEKSSENSSAERDLADVKSSLVNESETGSGSRLNFGDDIPSALRIAKKKRWNSIEERRIHQESELHSYLSRLIAAERERELEECQRNHEGDEDDSHVRAQQACIEAKHDKYMADMDELFSQVDEKRKKRDIPDYLCGKISFELMREPCITPSGITYDRKDIEEHLQRVGHFDPVTRSPLTQEQLIPNLAMKEVIDAFISENGWVEDYGSGSPAAKRVKLDYPYDVPDYA

SEQ ID NO: 728 - protein, 250 aa, synthetic construct
  source 1..250: note = TCF4-(GS)3-CHIP-NLS-HA peptide
MDDLGANDELISFKDEGEQEEKSSENSSAERDLADVKSSLVNESETGSGSGSRLNFGDDIPSALRIAKKKRWNSIEERRIHQESELHSYLSRLIAAERERELEECQRNHEGDEDDSHVRAQQACIEAKHDKYMADMDELFSQVDEKRKKRDIPDYLCGKISFELMREPCITPSGITYDRKDIEEHLQRVGHFDPVTRSPLTQEQLIPNLAMKEVIDAFISENGWVEDYGSGSPAAKRVKLDYPYDVPDYA

SEQ ID NO: 729 - protein, 252 aa, synthetic construct
  source 1..252: note = TCF4-(GS)4-CHIP-NLS-HA peptide
MDDLGANDELISFKDEGEQEEKSSENSSAERDLADVKSSLVNESETGSGSGSGSRLNFGDDIPSALRIAKKKRWNSIEERRIHQESELHSYLSRLIAAERERELEECQRNHEGDEDDSHVRAQQACIEAKHDKYMADMDELFSQVDEKRKKRDIPDYLCGKISFELMREPCITPSGITYDRKDIEEHLQRVGHFDPVTRSPLTQEQLIPNLAMKEVIDAFISENGWVEDYGSGSPAAKRVKLDYPYDVPDYA

SEQ ID NO: 730 - protein, 254 aa, synthetic construct
  source 1..254: note = TCF4-(GS)5-CHIP-NLS-HA peptide
MDDLGANDELISFKDEGEQEEKSSENSSAERDLADVKSSLVNESETGSGSGSGSGSRLNFGDDIPSALRIAKKKRWNSIEERRIHQESELHSYLSRLIAAERERELEECQRNHEGDEDDSHVRAQQACIEAKHDKYMADMDELFSQVDEKRKKRDIPDYLCGKISFELMREPCITPSGITYDRKDIEEHLQRVGHFDPVTRSPLTQEQLIPNLAMKEVIDAFISENGWVEDYGSGSPAAKRVKLDYPYDVPDYA

SEQ ID NO: 731 - protein, 256 aa, synthetic construct
  source 1..256: note = TCF4-(GS)6-CHIP-NLS-HA peptide
MDDLGANDELISFKDEGEQEEKSSENSSAERDLADVKSSLVNESETGSGSGSGSGSGSRLNFGDDIPSALRIAKKKRWNSIEERRIHQESELHSYLSRLIAAERERELEECQRNHEGDEDDSHVRAQQACIEAKHDKYMADMDELFSQVDEKRKKRDIPDYLCGKISFELMREPCITPSGITYDRKDIEEHLQRVGHFDPVTRSPLTQEQLIPNLAMKEVIDAFISENGWVEDYGSGSPAAKRVKLDYPYDVPDYA

SEQ ID NO: 732 - protein, 97 aa, synthetic construct
  source 1..97: note = NLS-DCAF1-(GS)1-TCF4 peptide
PAAKRVKLDGSGSGSQAPINFTSRLNRRASFPKYGGVDGGCFDRHLIFSRGSDDLGANDELISFKDEGEQEEKSSENSSAERDLADVKSSLVNESET

SEQ ID NO: 733 - protein, 99 aa, synthetic construct
  source 1..99: note = NLS-DCAF1-(GS)2-TCF4 peptide
PAAKRVKLDGSGSGSQAPINFTSRLNRRASFPKYGGVDGGCFDRHLIFSRGSGSDDLGANDELISFKDEGEQEEKSSENSSAERDLADVKSSLVNESET

SEQ ID NO: 734 - protein, 101 aa, synthetic construct
  source 1..101: note = NLS-DCAF1-(GS)3-TCF4 peptide
PAAKRVKLDGSGSGSQAPINFTSRLNRRASFPKYGGVDGGCFDRHLIFSRGSGSGSDDLGANDELISFKDEGEQEEKSSENSSAERDLADVKSSLVNESET

SEQ ID NO: 735 - protein, 103 aa, synthetic construct
  source 1..103: note = NLS-DCAF1-(GS)4-TCF4 peptide
PAAKRVKLDGSGSGSQAPINFTSRLNRRASFPKYGGVDGGCFDRHLIFSRGSGSGSGSDDLGANDELISFKDEGEQEEKSSENSSAERDLADVKSSLVNESET

SEQ ID NO: 736 - protein, 105 aa, synthetic construct
  source 1..105: note = NLS-DCAF1-(GS)5-TCF4 peptide
PAAKRVKLDGSGSGSQAPINFTSRLNRRASFPKYGGVDGGCFDRHLIFSRGSGSGSGSGSDDLGANDELISFKDEGEQEEKSSENSSAERDLADVKSSLVNESET

SEQ ID NO: 737 - protein, 107 aa, synthetic construct
  source 1..107: note = NLS-DCAF1-(GS)6-TCF4 peptide
PAAKRVKLDGSGSGSQAPINFTSRLNRRASFPKYGGVDGGCFDRHLIFSRGSGSGSGSGSGSDDLGANDELISFKDEGEQEEKSSENSSAERDLADVKSSLVNESET

SEQ ID NO: 738 - protein, 107 aa, synthetic construct
  source 1..107: note = HA-NLS-DCAF1-(GS)1-TCF4 peptide
MYPYDVPDYAPAAKRVKLDGSGSGSQAPINFTSRLNRRASFPKYGGVDGGCFDRHLIFSRGSDDLGANDELISFKDEGEQEEKSSENSSAERDLADVKSSLVNESET

SEQ ID NO: 739 - protein, 109 aa, synthetic construct
  source 1..109: note = HA-NLS-DCAF1-(GS)2-TCF4 peptide
MYPYDVPDYAPAAKRVKLDGSGSGSQAPINFTSRLNRRASFPKYGGVDGGCFDRHLIFSRGSGSDDLGANDELISFKDEGEQEEKSSENSSAERDLADVKSSLVNESET

SEQ ID NO: 740 - protein, 111 aa, synthetic construct
  source 1..111: note = HA-NLS-DCAF1-(GS)3-TCF4 peptide
MYPYDVPDYAPAAKRVKLDGSGSGSQAPINFTSRLNRRASFPKYGGVDGGCFDRHLIFSRGSGSGSDDLGANDELISFKDEGEQEEKSSENSSAERDLADVKSSLVNESET

SEQ ID NO: 741 - protein, 113 aa, synthetic construct
  source 1..113: note = HA-NLS-DCAF1-(GS)4-TCF4 peptide
MYPYDVPDYAPAAKRVKLDGSGSGSQAPINFTSRLNRRASFPKYGGVDGGCFDRHLIFSRGSGSGSGSDDLGANDELISFKDEGEQEEKSSENSSAERDLADVKSSLVNESET

SEQ ID NO: 742 - protein, 115 aa, synthetic construct
  source 1..115: note = HA-NLS-DCAF1-(GS)5-TCF4 peptide
MYPYDVPDYAPAAKRVKLDGSGSGSQAPINFTSRLNRRASFPKYGGVDGGCFDRHLIFSRGSGSGSGSGSDDLGANDELISFKDEGEQEEKSSENSSAERDLADVKSSLVNESET

SEQ ID NO: 743 - protein, 117 aa, synthetic construct
  source 1..117: note = HA-NLS-DCAF1-(GS)6-TCF4 peptide
MYPYDVPDYAPAAKRVKLDGSGSGSQAPINFTSRLNRRASFPKYGGVDGGCFDRHLIFSRGSGSGSGSGSGSDDLGANDELISFKDEGEQEEKSSENSSAERDLADVKSSLVNESET

SEQ ID NO: 744 - protein, 418 aa, synthetic construct
  source 1..418: note = NLS-TCF4-(GS)1-E6AP peptide
PAAKRVKLDGSGSGSDDLGANDELISFKDEGEQEEKSSENSSAERDLADVKSSLVNESETGSNPYLRLKVRRDHIIDDALVRLEMIAMENPADLKKQLYVEFEGEQGVDEGGVSKEFFQLVVEEIFNPDIGMFTYDESTKLFWFNPSSFETEGQFTLIGIVLGLAIYNNCILDVHFPMVVYRKLMGKKGTFRDLGDSHPVLYQSLKDLLEYEGNVEDDMMITFQISQTDLFGNPMMYDLKENGDKIPITNENRKEFVNLYSDYILNKSVEKQFKAFRRGFHMVTNESPLKYLFRPEEIELLICGSRNLDFQALEETTEYDGGYTRDSVLIREFWEIVHSFTDEQKRLFLQFTTGTDRAPVGGLGKLKMIIAKNGPDTERLPTSHTCFNVLLLPEYSSKEKLKERLLKAITYAKGFGML

SEQ ID NO: 745 - protein, 420 aa, synthetic construct
  source 1..420: note = NLS-TCF4-(GS)2-E6AP peptide
PAAKRVKLDGSGSGSDDLGANDELISFKDEGEQEEKSSENSSAERDLADVKSSLVNESETGSGSNPYLRLKVRRDHIIDDALVRLEMIAMENPADLKKQLYVEFEGEQGVDEGGVSKEFFQLVVEEIFNPDIGMFTYDESTKLFWFNPSSFETEGQFTLIGIVLGLAIYNNCILDVHFPMVVYRKLMGKKGTFRDLGDSHPVLYQSLKDLLEYEGNVEDDMMITFQISQTDLFGNPMMYDLKENGDKIPITNENRKEFVNLYSDYILNKSVEKQFKAFRRGFHMVTNESPLKYLFRPEEIELLICGSRNLDFQALEETTEYDGGYTRDSVLIREFWEIVHSFTDEQKRLFLQFTTGTDRAPVGGLGKLKMIIAKNGPDTERLPTSHTCFNVLLLPEYSSKEKLKERLLKAITYAKGFGML

SEQ ID NO: 746 - protein, 422 aa, synthetic construct
  source 1..422: note = NLS-TCF4(GS)3-E6AP peptide
PAAKRVKLDGSGSGSDDLGANDELISFKDEGEQEEKSSENSSAERDLADVKSSLVNESETGSGSGSNPYLRLKVRRDHIIDDALVRLEMIAMENPADLKKQLYVEFEGEQGVDEGGVSKEFFQLVVEEIFNPDIGMFTYDESTKLFWFNPSSFETEGQFTLIGIVLGLAIYNNCILDVHFPMVVYRKLMGKKGTFRDLGDSHPVLYQSLKDLLEYEGNVEDDMMITFQISQTDLFGNPMMYDLKENGDKIPITNENRKEFVNLYSDYILNKSVEKQFKAFRRGFHMVTNESPLKYLFRPEEIELLICGSRNLDFQALEETTEYDGGYTRDSVLIREFWEIVHSFTDEQKRLFLQFTTGTDRAPVGGLGKLKMIIAKNGPDTERLPTSHTCFNVLLLPEYSSKEKLKERLLKAITYAKGFGML

SEQ ID NO: 747 - protein, 424 aa, synthetic construct
  source 1..424: note = NLS-TCF4-(GS)4-E6AP peptide
PAAKRVKLDGSGSGSDDLGANDELISFKDEGEQEEKSSENSSAERDLADVKSSLVNESETGSGSGSGSNPYLRLKVRRDHIIDDALVRLEMIAMENPADLKKQLYVEFEGEQGVDEGGVSKEFFQLVVEEIFNPDIGMFTYDESTKLFWFNPSSFETEGQFTLIGIVLGLAIYNNCILDVHFPMVVYRKLMGKKGTFRDLGDSHPVLYQSLKDLLEYEGNVEDDMMITFQISQTDLFGNPMMYDLKENGDKIPITNENRKEFVNLYSDYILNKSVEKQFKAFRRGFHMVTNESPLKYLFRPEEIELLICGSRNLDFQALEETTEYDGGYTRDSVLIREFWEIVHSFTDEQKRLFLQFTTGTDRAPVGGLGKLKMIIAKNGPDTERLPTSHTCFNVLLLPEYSSKEKLKERLLKAITYAKGFGML

SEQ ID NO: 748 - protein, 426 aa, synthetic construct
  source 1..426: note = NLS-TCF4-(GS)5-E6AP peptide
PAAKRVKLDGSGSGSDDLGANDELISFKDEGEQEEKSSENSSAERDLADVKSSLVNESETGSGSGSGSGSNPYLRLKVRRDHIIDDALVRLEMIAMENPADLKKQLYVEFEGEQGVDEGGVSKEFFQLVVEEIFNPDIGMFTYDESTKLFWFNPSSFETEGQFTLIGIVLGLAIYNNCILDVHFPMVVYRKLMGKKGTFRDLGDSHPVLYQSLKDLLEYEGNVEDDMMITFQISQTDLFGNPMMYDLKENGDKIPITNENRKEFVNLYSDYILNKSVEKQFKAFRRGFHMVTNESPLKYLFRPEEIELLICGSRNLDFQALEETTEYDGGYTRDSVLIREFWEIVHSFTDEQKRLFLQFTTGTDRAPVGGLGKLKMIIAKNGPDTERLPTSHTCFNVLLLPEYSSKEKLKERLLKAITYAKGFGML

SEQ ID NO: 749 - protein, 428 aa, synthetic construct
  source 1..428: note = NLS-TCF4-(GS)6-E6AP peptide
PAAKRVKLDGSGSGSDDLGANDELISFKDEGEQEEKSSENSSAERDLADVKSSLVNESETGSGSGSGSGSGSNPYLRLKVRRDHIIDDALVRLEMIAMENPADLKKQLYVEFEGEQGVDEGGVSKEFFQLVVEEIFNPDIGMFTYDESTKLFWFNPSSFETEGQFTLIGIVLGLAIYNNCILDVHFPMVVYRKLMGKKGTFRDLGDSHPVLYQSLKDLLEYEGNVEDDMMITFQISQTDLFGNPMMYDLKENGDKIPITNENRKEFVNLYSDYILNKSVEKQFKAFRRGFHMVTNESPLKYLFRPEEIELLICGSRNLDFQALEETTEYDGGYTRDSVLIREFWEIVHSFTDEQKRLFLQFTTGTDRAPVGGLGKLKMIIAKNGPDTERLPTSHTCFNVLLLPEYSSKEKLKERLLKAITYAKGFGML

SEQ ID NO: 750 - protein, 428 aa, synthetic construct
  source 1..428: note = HA-NLS-TCF4-(GS)1-E6AP peptide
MYPYDVPDYAPAAKRVKLDGSGSGSDDLGANDELISFKDEGEQEEKSSENSSAERDLADVKSSLVNESETGSNPYLRLKVRRDHIIDDALVRLEMIAMENPADLKKQLYVEFEGEQGVDEGGVSKEFFQLVVEEIFNPDIGMFTYDESTKLFWFNPSSFETEGQFTLIGIVLGLAIYNNCILDVHFPMVVYRKLMGKKGTFRDLGDSHPVLYQSLKDLLEYEGNVEDDMMITFQISQTDLFGNPMMYDLKENGDKIPITNENRKEFVNLYSDYILNKSVEKQFKAFRRGFHMVTNESPLKYLFRPEEIELLICGSRNLDFQALEETTEYDGGYTRDSVLIREFWEIVHSFTDEQKRLFLQFTTGTDRAPVGGLGKLKMIIAKNGPDTERLPTSHTCFNVLLLPEYSSKEKLKERLLKAITYAKGFGML

SEQ ID NO: 751 - protein, 430 aa, synthetic construct
  source 1..430: note = HA-NLS-TCF4-(GS)2-E6AP peptide
MYPYDVPDYAPAAKRVKLDGSGSGSDDLGANDELISFKDEGEQEEKSSENSSAERDLADVKSSLVNESETGSGSNPYLRLKVRRDHIIDDALVRLEMIAMENPADLKKQLYVEFEGEQGVDEGGVSKEFFQLVVEEIFNPDIGMFTYDESTKLFWFNPSSFETEGQFTLIGIVLGLAIYNNCILDVHFPMVVYRKLMGKKGTFRDLGDSHPVLYQSLKDLLEYEGNVEDDMMITFQISQTDLFGNPMMYDLKENGDKIPITNENRKEFVNLYSDYILNKSVEKQFKAFRRGFHMVTNESPLKYLFRPEEIELLICGSRNLDFQALEETTEYDGGYTRDSVLIREFWEIVHSFTDEQKRLFLQFTTGTDRAPVGGLGKLKMIIAKNGPDTERLPTSHTCFNVLLLPEYSSKEKLKERLLKAITYAKGFGML

SEQ ID NO: 752 - protein, 432 aa, synthetic construct
  source 1..432: note = HA-NLS-TCF4(GS)3-E6AP peptide
MYPYDVPDYAPAAKRVKLDGSGSGSDDLGANDELISFKDEGEQEEKSSENSSAERDLADVKSSLVNESETGSGSGSNPYLRLKVRRDHIIDDALVRLEMIAMENPADLKKQLYVEFEGEQGVDEGGVSKEFFQLVVEEIFNPDIGMFTYDESTKLFWFNPSSFETEGQFTLIGIVLGLAIYNNCILDVHFPMVVYRKLMGKKGTFRDLGDSHPVLYQSLKDLLEYEGNVEDDMMITFQISQTDLFGNPMMYDLKENGDKIPITNENRKEFVNLYSDYILNKSVEKQFKAFRRGFHMVTNESPLKYLFRPEEIELLICGSRNLDFQALEETTEYDGGYTRDSVLIREFWEIVHSFTDEQKRLFLQFTTGTDRAPVGGLGKLKMIIAKNGPDTERLPTSHTCFNVLLLPEYSSKEKLKERLLKAITYAKGFGML

SEQ ID NO: 753 - protein, 434 aa, synthetic construct
  source 1..434: note = HA-NLS-TCF4-(GS)4-E6AP peptide
MYPYDVPDYAPAAKRVKLDGSGSGSDDLGANDELISFKDEGEQEEKSSENSSAERDLADVKSSLVNESETGSGSGSGSNPYLRLKVRRDHIIDDALVRLEMIAMENPADLKKQLYVEFEGEQGVDEGGVSKEFFQLVVEEIFNPDIGMFTYDESTKLFWFNPSSFETEGQFTLIGIVLGLAIYNNCILDVHFPMVVYRKLMGKKGTFRDLGDSHPVLYQSLKDLLEYEGNVEDDMMITFQISQTDLFGNPMMYDLKENGDKIPITNENRKEFVNLYSDYILNKSVEKQFKAFRRGFHMVTNESPLKYLFRPEEIELLICGSRNLDFQALEETTEYDGGYTRDSVLIREFWEIVHSFTDEQKRLFLQFTTGTDRAPVGGLGKLKMIIAKNGPDTERLPTSHTCFNVLLLPEYSSKEKLKERLLKAITYAKGFGML

SEQ ID NO: 754 - protein, 436 aa, synthetic construct
  source 1..436: note = HA-NLS-TCF4-(GS)5-E6AP peptide
MYPYDVPDYAPAAKRVKLDGSGSGSDDLGANDELISFKDEGEQEEKSSENSSAERDLADVKSSLVNESETGSGSGSGSGSNPYLRLKVRRDHIIDDALVRLEMIAMENPADLKKQLYVEFEGEQGVDEGGVSKEFFQLVVEEIFNPDIGMFTYDESTKLFWFNPSSFETEGQFTLIGIVLGLAIYNNCILDVHFPMVVYRKLMGKKGTFRDLGDSHPVLYQSLKDLLEYEGNVEDDMMITFQISQTDLFGNPMMYDLKENGDKIPITNENRKEFVNLYSDYILNKSVEKQFKAFRRGFHMVTNESPLKYLFRPEEIELLICGSRNLDFQALEETTEYDGGYTRDSVLIREFWEIVHSFTDEQKRLFLQFTTGTDRAPVGGLGKLKMIIAKNGPDTERLPTSHTCFNVLLLPEYSSKEKLKERLLKAITYAKGFGML

SEQ ID NO: 755 - protein, 438 aa, synthetic construct
  source 1..438: note = HA-NLS-TCF4-(GS)6-E6AP peptide
MYPYDVPDYAPAAKRVKLDGSGSGSDDLGANDELISFKDEGEQEEKSSENSSAERDLADVKSSLVNESETGSGSGSGSGSGSNPYLRLKVRRDHIIDDALVRLEMIAMENPADLKKQLYVEFEGEQGVDEGGVSKEFFQLVVEEIFNPDIGMFTYDESTKLFWFNPSSFETEGQFTLIGIVLGLAIYNNCILDVHFPMVVYRKLMGKKGTFRDLGDSHPVLYQSLKDLLEYEGNVEDDMMITFQISQTDLFGNPMMYDLKENGDKIPITNENRKEFVNLYSDYILNKSVEKQFKAFRRGFHMVTNESPLKYLFRPEEIELLICGSRNLDFQALEETTEYDGGYTRDSVLIREFWEIVHSFTDEQKRLFLQFTTGTDRAPVGGLGKLKMIIAKNGPDTERLPTSHTCFNVLLLPEYSSKEKLKERLLKAITYAKGFGML

SEQ ID NO: 756 - protein, 414 aa, synthetic construct
  source 1..414: note = FBXW7a-(GS)1-TCF4 peptide
NQELLSVGSKRRRTGGSLRGNPSSSQVDEEQMNRVVEEEQQQQLRQQEEEHTARNGEVVGVEPRPGGQNDSQQGQLEENNNRFISVDEDSSGNQEEQEEDEEHAGEQDEEDEEEEEMDQESDDFDQSDDSSREDEHTHTNSVTNSSSIVDLPVHQLSSPFYTKTTKMKRKLDHGSEVRSFSLGKKPCKVSEYTSTTGLVPCSATPTTFGDLRAANGQGQQRRRITSVQPPTGLQEWLKMFQSWSGPEKLLALDELIDSCEPTQVKHMMQVIEPQFQRDFISLLPKELALYVLSFLEPKDLLQAAQTCRYWRILAEDNLLWREKCKEEGIDEPLHIKRRKVIKPGFIHSPWKSAYIRQHRIDTNSRRGGSDDLGANDELISFKDEGEQEEKSSENSSAERDLADVKSSLVNESET

SEQ ID NO: 757 - protein, 416 aa, synthetic construct
  source 1..416: note = FBXW7a-(GS)2-TCF4 peptide
NQELLSVGSKRRRTGGSLRGNPSSSQVDEEQMNRVVEEEQQQQLRQQEEEHTARNGEVVGVEPRPGGQNDSQQGQLEENNNRFISVDEDSSGNQEEQEEDEEHAGEQDEEDEEEEEMDQESDDFDQSDDSSREDEHTHTNSVTNSSSIVDLPVHQLSSPFYTKTTKMKRKLDHGSEVRSFSLGKKPCKVSEYTSTTGLVPCSATPTTFGDLRAANGQGQQRRRITSVQPPTGLQEWLKMFQSWSGPEKLLALDELIDSCEPTQVKHMMQVIEPQFQRDFISLLPKELALYVLSFLEPKDLLQAAQTCRYWRILAEDNLLWREKCKEEGIDEPLHIKRRKVIKPGFIHSPWKSAYIRQHRIDTNSRRGGSGSDDLGANDELISFKDEGEQEEKSSENSSAERDLADVKSSLVNESET

SEQ ID NO: 758 - protein, 418 aa, synthetic construct
  source 1..418: note = FBXW7a-(GS)3-TCF4 peptide
NQELLSVGSKRRRTGGSLRGNPSSSQVDEEQMNRVVEEEQQQQLRQQEEEHTARNGEVVGVEPRPGGQNDSQQGQLEENNNRFISVDEDSSGNQEEQEEDEEHAGEQDEEDEEEEEMDQESDDFDQSDDSSREDEHTHTNSVTNSSSIVDLPVHQLSSPFYTKTTKMKRKLDHGSEVRSFSLGKKPCKVSEYTSTTGLVPCSATPTTFGDLRAANGQGQQRRRITSVQPPTGLQEWLKMFQSWSGPEKLLALDELIDSCEPTQVKHMMQVIEPQFQRDFISLLPKELALYVLSFLEPKDLLQAAQTCRYWRILAEDNLLWREKCKEEGIDEPLHIKRRKVIKPGFIHSPWKSAYIRQHRIDTNSRRGGSGSGSDDLGANDELISFKDEGEQEEKSSENSSAERDLADVKSSLVNESET

SEQ ID NO: 759 - protein, 420 aa, synthetic construct
  source 1..420: note = FBXW7a-(GS)4-TCF4 peptide
NQELLSVGSKRRRTGGSLRGNPSSSQVDEEQMNRVVEEEQQQQLRQQEEEHTARNGEVVGVEPRPGGQNDSQQGQLEENNNRFISVDEDSSGNQEEQEEDEEHAGEQDEEDEEEEEMDQESDDFDQSDDSSREDEHTHTNSVTNSSSIVDLPVHQLSSPFYTKTTKMKRKLDHGSEVRSFSLGKKPCKVSEYTSTTGLVPCSATPTTFGDLRAANGQGQQRRRITSVQPPTGLQEWLKMFQSWSGPEKLLALDELIDSCEPTQVKHMMQVIEPQFQRDFISLLPKELALYVLSFLEPKDLLQAAQTCRYWRILAEDNLLWREKCKEEGIDEPLHIKRRKVIKPGFIHSPWKSAYIRQHRIDTNSRRGGSGSGSGSDDLGANDELISFKDEGEQEEKSSENSSAERDLADVKSSLVNESET

SEQ ID NO: 760 - protein, 422 aa, synthetic construct
  source 1..422: note = FBXW7a-(GS)5-TCF4 peptide
NQELLSVGSKRRRTGGSLRGNPSSSQVDEEQMNRVVEEEQQQQLRQQEEEHTARNGEVVGVEPRPGGQNDSQQGQLEENNNRFISVDEDSSGNQEEQEEDEEHAGEQDEEDEEEEEMDQESDDFDQSDDSSREDEHTHTNSVTNSSSIVDLPVHQLSSPFYTKTTKMKRKLDHGSEVRSFSLGKKPCKVSEYTSTTGLVPCSATPTTFGDLRAANGQGQQRRRITSVQPPTGLQEWLKMFQSWSGPEKLLALDELIDSCEPTQVKHMMQVIEPQFQRDFISLLPKELALYVLSFLEPKDLLQAAQTCRYWRILAEDNLLWREKCKEEGIDEPLHIKRRKVIKPGFIHSPWKSAYIRQHRIDTNSRRGGSGSGSGSGSDDLGANDELISFKDEGEQEEKSSENSSAERDLADVKSSLVNESET

SEQ ID NO: 761 - protein, 424 aa, synthetic construct
  source 1..424: note = FBXW7a-(GS)6-TCF4 peptide
NQELLSVGSKRRRTGGSLRGNPSSSQVDEEQMNRVVEEEQQQQLRQQEEEHTARNGEVVGVEPRPGGQNDSQQGQLEENNNRFISVDEDSSGNQEEQEEDEEHAGEQDEEDEEEEEMDQESDDFDQSDDSSREDEHTHTNSVTNSSSIVDLPVHQLSSPFYTKTTKMKRKLDHGSEVRSFSLGKKPCKVSEYTSTTGLVPCSATPTTFGDLRAANGQGQQRRRITSVQPPTGLQEWLKMFQSWSGPEKLLALDELIDSCEPTQVKHMMQVIEPQFQRDFISLLPKELALYVLSFLEPKDLLQAAQTCRYWRILAEDNLLWREKCKEEGIDEPLHIKRRKVIKPGFIHSPWKSAYIRQHRIDTNSRRGGSGSGSGSGSGSDDLGANDELISFKDEGEQEEKSSENSSAERDLADVKSSLVNESET

SEQ ID NO: 762 - protein, 424 aa, synthetic construct
  source 1..424: note = HA-FBXW7a-(GS)1-TCF4 peptide
MYPYDVPDYANQELLSVGSKRRRTGGSLRGNPSSSQVDEEQMNRVVEEEQQQQLRQQEEEHTARNGEVVGVEPRPGGQNDSQQGQLEENNNRFISVDEDSSGNQEEQEEDEEHAGEQDEEDEEEEEMDQESDDFDQSDDSSREDEHTHTNSVTNSSSIVDLPVHQLSSPFYTKTTKMKRKLDHGSEVRSFSLGKKPCKVSEYTSTTGLVPCSATPTTFGDLRAANGQGQQRRRITSVQPPTGLQEWLKMFQSWSGPEKLLALDELIDSCEPTQVKHMMQVIEPQFQRDFISLLPKELALYVLSFLEPKDLLQAAQTCRYWRILAEDNLLWREKCKEEGIDEPLHIKRRKVIKPGFIHSPWKSAYIRQHRIDTNSRRGGSDDLGANDELISFKDEGEQEEKSSENSSAERDLADVKSSLVNESET

SEQ ID NO: 763 - protein, 426 aa, synthetic construct
  source 1..426: note = HA-FBXW7a-(GS)2-TCF4 peptide
MYPYDVPDYANQELLSVGSKRRRTGGSLRGNPSSSQVDEEQMNRVVEEEQQQQLRQQEEEHTARNGEVVGVEPRPGGQNDSQQGQLEENNNRFISVDEDSSGNQEEQEEDEEHAGEQDEEDEEEEEMDQESDDFDQSDDSSREDEHTHTNSVTNSSSIVDLPVHQLSSPFYTKTTKMKRKLDHGSEVRSFSLGKKPCKVSEYTSTTGLVPCSATPTTFGDLRAANGQGQQRRRITSVQPPTGLQEWLKMFQSWSGPEKLLALDELIDSCEPTQVKHMMQVIEPQFQRDFISLLPKELALYVLSFLEPKDLLQAAQTCRYWRILAEDNLLWREKCKEEGIDEPLHIKRRKVIKPGFIHSPWKSAYIRQHRIDTNSRRGGSGSDDLGANDELISFKDEGEQEEKSSENSSAERDLADVKSSLVNESET

SEQ ID NO: 764 - protein, 428 aa, synthetic construct
  source 1..428: note = HA-FBXW7a-(GS)3-TCF4 peptide
MYPYDVPDYANQELLSVGSKRRRTGGSLRGNPSSSQVDEEQMNRVVEEEQQQQLRQQEEEHTARNGEVVGVEPRPGGQNDSQQGQLEENNNRFISVDEDSSGNQEEQEEDEEHAGEQDEEDEEEEEMDQESDDFDQSDDSSREDEHTHTNSVTNSSSIVDLPVHQLSSPFYTKTTKMKRKLDHGSEVRSFSLGKKPCKVSEYTSTTGLVPCSATPTTFGDLRAANGQGQQRRRITSVQPPTGLQEWLKMFQSWSGPEKLLALDELIDSCEPTQVKHMMQVIEPQFQRDFISLLPKELALYVLSFLEPKDLLQAAQTCRYWRILAEDNLLWREKCKEEGIDEPLHIKRRKVIKPGFIHSPWKSAYIRQHRIDTNSRRGGSGSGSDDLGANDELISFKDEGEQEEKSSENSSAERDLADVKSSLVNESET

SEQ ID NO: 765 - protein, 430 aa, synthetic construct
  source 1..430: note = HA-FBXW7a-(GS)4-TCF4 peptide
MYPYDVPDYANQELLSVGSKRRRTGGSLRGNPSSSQVDEEQMNRVVEEEQQQQLRQQEEEHTARNGEVVGVEPRPGGQNDSQQGQLEENNNRFISVDEDSSGNQEEQEEDEEHAGEQDEEDEEEEEMDQESDDFDQSDDSSREDEHTHTNSVTNSSSIVDLPVHQLSSPFYTKTTKMKRKLDHGSEVRSFSLGKKPCKVSEYTSTTGLVPCSATPTTFGDLRAANGQGQQRRRITSVQPPTGLQEWLKMFQSWSGPEKLLALDELIDSCEPTQVKHMMQVIEPQFQRDFISLLPKELALYVLSFLEPKDLLQAAQTCRYWRILAEDNLLWREKCKEEGIDEPLHIKRRKVIKPGFIHSPWKSAYIRQHRIDTNSRRGGSGSGSGSDDLGANDELISFKDEGEQEEKSSENSSAERDLADVKSSLVNESET

SEQ ID NO: 766 - protein, 432 aa, synthetic construct
  source 1..432: note = HA-FBXW7a-(GS)5-TCF4 peptide
MYPYDVPDYANQELLSVGSKRRRTGGSLRGNPSSSQVDEEQMNRVVEEEQQQQLRQQEEEHTARNGEVVGVEPRPGGQNDSQQGQLEENNNRFISVDEDSSGNQEEQEEDEEHAGEQDEEDEEEEEMDQESDDFDQSDDSSREDEHTHTNSVTNSSSIVDLPVHQLSSPFYTKTTKMKRKLDHGSEVRSFSLGKKPCKVSEYTSTTGLVPCSATPTTFGDLRAANGQGQQRRRITSVQPPTGLQEWLKMFQSWSGPEKLLALDELIDSCEPTQVKHMMQVIEPQFQRDFISLLPKELALYVLSFLEPKDLLQAAQTCRYWRILAEDNLLWREKCKEEGIDEPLHIKRRKVIKPGFIHSPWKSAYIRQHRIDTNSRRGGSGSGSGSGSDDLGANDELISFKDEGEQEEKSSENSSAERDLADVKSSLVNESET

SEQ ID NO: 767 - protein, 434 aa, synthetic construct
  source 1..434: note = HA-FBXW7a-(GS)6-TCF4 peptide
MYPYDVPDYANQELLSVGSKRRRTGGSLRGNPSSSQVDEEQMNRVVEEEQQQQLRQQEEEHTARNGEVVGVEPRPGGQNDSQQGQLEENNNRFISVDEDSSGNQEEQEEDEEHAGEQDEEDEEEEEMDQESDDFDQSDDSSREDEHTHTNSVTNSSSIVDLPVHQLSSPFYTKTTKMKRKLDHGSEVRSFSLGKKPCKVSEYTSTTGLVPCSATPTTFGDLRAANGQGQQRRRITSVQPPTGLQEWLKMFQSWSGPEKLLALDELIDSCEPTQVKHMMQVIEPQFQRDFISLLPKELALYVLSFLEPKDLLQAAQTCRYWRILAEDNLLWREKCKEEGIDEPLHIKRRKVIKPGFIHSPWKSAYIRQHRIDTNSRRGGSGSGSGSGSGSDDLGANDELISFKDEGEQEEKSSENSSAERDLADVKSSLVNESET

SEQ ID NO: 768 - protein, 383 aa, synthetic construct
  source 1..383: note = NLS-Keap1-(GS)1-TCF4 peptide
PAAKRVKLDGSGSGSQPDPRPSGAGACCRFLPLQSQCPEGAGDAVMYASTECKAEVTPSQHGNRTFSYTLEDHTKQAFGIMNELRLSQQLCDVTLQVKYQDAPAAQFMAHKVVLASSSPVFKAMFTNGLREQGMEVVSIEGIHPKVMERLIEFAYTASISMGEKCVLHVMNGAVMYQIDSVVRACSDFLVQQLDPSNAIGIANFAEQIGCVELHQRAREYIYMHFGEVAKQEEFFNLSHCQLVTLISRDDLNVRCESEVFHACINWVKYDCEQRRFYVQALLRAVRCHSLTPNFLQMQLQKCEILQSDSRCKDYLVKIFEELTLHKPTQVMPCRAPGSDDLGANDELISFKDEGEQEEKSSENSSAERDLADVKSSLVNESET

SEQ ID NO: 769 - protein, 385 aa, synthetic construct
  source 1..385: note = NLS-Keap1-(GS)2-TCF4 peptide
PAAKRVKLDGSGSGSQPDPRPSGAGACCRFLPLQSQCPEGAGDAVMYASTECKAEVTPSQHGNRTFSYTLEDHTKQAFGIMNELRLSQQLCDVTLQVKYQDAPAAQFMAHKVVLASSSPVFKAMFTNGLREQGMEVVSIEGIHPKVMERLIEFAYTASISMGEKCVLHVMNGAVMYQIDSVVRACSDFLVQQLDPSNAIGIANFAEQIGCVELHQRAREYIYMHFGEVAKQEEFFNLSHCQLVTLISRDDLNVRCESEVFHACINWVKYDCEQRRFYVQALLRAVRCHSLTPNFLQMQLQKCEILQSDSRCKDYLVKIFEELTLHKPTQVMPCRAPGSGSDDLGANDELISFKDEGEQEEKSSENSSAERDLADVKSSLVNESET

SEQ ID NO: 770 - protein, 387 aa, synthetic construct
  source 1..387: note = NLS-Keap1-(GS)3-TCF4 peptide
PAAKRVKLDGSGSGSQPDPRPSGAGACCRFLPLQSQCPEGAGDAVMYASTECKAEVTPSQHGNRTFSYTLEDHTKQAFGIMNELRLSQQLCDVTLQVKYQDAPAAQFMAHKVVLASSSPVFKAMFTNGLREQGMEVVSIEGIHPKVMERLIEFAYTASISMGEKCVLHVMNGAVMYQIDSVVRACSDFLVQQLDPSNAIGIANFAEQIGCVELHQRAREYIYMHFGEVAKQEEFFNLSHCQLVTLISRDDLNVRCESEVFHACINWVKYDCEQRRFYVQALLRAVRCHSLTPNFLQMQLQKCEILQSDSRCKDYLVKIFEELTLHKPTQVMPCRAPGSGSGSDDLGANDELISFKDEGEQEEKSSENSSAERDLADVKSSLVNESET

SEQ ID NO: 771 - protein, 389 aa, synthetic construct
  source 1..389: note = NLS-Keap1-(GS)4-TCF4 peptide
PAAKRVKLDGSGSGSQPDPRPSGAGACCRFLPLQSQCPEGAGDAVMYASTECKAEVTPSQHGNRTFSYTLEDHTKQAFGIMNELRLSQQLCDVTLQVKYQDAPAAQFMAHKVVLASSSPVFKAMFTNGLREQGMEVVSIEGIHPKVMERLIEFAYTASISMGEKCVLHVMNGAVMYQIDSVVRACSDFLVQQLDPSNAIGIANFAEQIGCVELHQRAREYIYMHFGEVAKQEEFFNLSHCQLVTLISRDDLNVRCESEVFHACINWVKYDCEQRRFYVQALLRAVRCHSLTPNFLQMQLQKCEILQSDSRCKDYLVKIFEELTLHKPTQVMPCRAPGSGSGSGSDDLGANDELISFKDEGEQEEKSSENSSAERDLADVKSSLVNESET

SEQ ID NO: 772 - protein, 391 aa, synthetic construct
  source 1..391: note = NLS-Keap1-(GS)5-TCF4 peptide
PAAKRVKLDGSGSGSQPDPRPSGAGACCRFLPLQSQCPEGAGDAVMYASTECKAEVTPSQHGNRTFSYTLEDHTKQAFGIMNELRLSQQLCDVTLQVKYQDAPAAQFMAHKVVLASSSPVFKAMFTNGLREQGMEVVSIEGIHPKVMERLIEFAYTASISMGEKCVLHVMNGAVMYQIDSVVRACSDFLVQQLDPSNAIGIANFAEQIGCVELHQRAREYIYMHFGEVAKQEEFFNLSHCQLVTLISRDDLNVRCESEVFHACINWVKYDCEQRRFYVQALLRAVRCHSLTPNFLQMQLQKCEILQSDSRCKDYLVKIFEELTLHKPTQVMPCRAPGSGSGSGSGSDDLGANDELISFKDEGEQEEKSSENSSAERDLADVKSSLVNESET

SEQ ID NO: 773 - protein, 393 aa, synthetic construct
  source 1..393: note = NLS-Keap1-(GS)6-TCF4 peptide
PAAKRVKLDGSGSGSQPDPRPSGAGACCRFLPLQSQCPEGAGDAVMYASTECKAEVTPSQHGNRTFSYTLEDHTKQAFGIMNELRLSQQLCDVTLQVKYQDAPAAQFMAHKVVLASSSPVFKAMFTNGLREQGMEVVSIEGIHPKVMERLIEFAYTASISMGEKCVLHVMNGAVMYQIDSVVRACSDFLVQQLDPSNAIGIANFAEQIGCVELHQRAREYIYMHFGEVAKQEEFFNLSHCQLVTLISRDDLNVRCESEVFHACINWVKYDCEQRRFYVQALLRAVRCHSLTPNFLQMQLQKCEILQSDSRCKDYLVKIFEELTLHKPTQVMPCRAPGSGSGSGSGSGSDDLGANDELISFKDEGEQEEKSSENSSAERDLADVKSSLVNESET

SEQ ID NO: 774 - protein, 393 aa, synthetic construct
  source 1..393: note = HA-NLS-Keap1-(GS)1-TCF4 peptide
MYPYDVPDYAPAAKRVKLDGSGSGSQPDPRPSGAGACCRFLPLQSQCPEGAGDAVMYASTECKAEVTPSQHGNRTFSYTLEDHTKQAFGIMNELRLSQQLCDVTLQVKYQDAPAAQFMAHKVVLASSSPVFKAMFTNGLREQGMEVVSIEGIHPKVMERLIEFAYTASISMGEKCVLHVMNGAVMYQIDSVVRACSDFLVQQLDPSNAIGIANFAEQIGCVELHQRAREYIYMHFGEVAKQEEFFNLSHCQLVTLISRDDLNVRCESEVFHACINWVKYDCEQRRFYVQALLRAVRCHSLTPNFLQMQLQKCEILQSDSRCKDYLVKIFEELTLHKPTQVMPCRAPGSDDLGANDELISFKDEGEQEEKSSENSSAERDLADVKSSLVNESET

SEQ ID NO: 775 - protein, 395 aa, synthetic construct
  source 1..395: note = HA-NLS-Keap1-(GS)2-TCF4 peptide
MYPYDVPDYAPAAKRVKLDGSGSGSQPDPRPSGAGACCRFLPLQSQCPEGAGDAVMYASTECKAEVTPSQHGNRTFSYTLEDHTKQAFGIMNELRLSQQLCDVTLQVKYQDAPAAQFMAHKVVLASSSPVFKAMFTNGLREQGMEVVSIEGIHPKVMERLIEFAYTASISMGEKCVLHVMNGAVMYQIDSVVRACSDFLVQQLDPSNAIGIANFAEQIGCVELHQRAREYIYMHFGEVAKQEEFFNLSHCQLVTLISRDDLNVRCESEVFHACINWVKYDCEQRRFYVQALLRAVRCHSLTPNFLQMQLQKCEILQSDSRCKDYLVKIFEELTLHKPTQVMPCRAPGSGSDDLGANDELISFKDEGEQEEKSSENSSAERDLADVKSSLVNESET

SEQ ID NO: 776 - protein, 397 aa, synthetic construct
  source 1..397: note = HA-NLS-Keap1-(GS)3-TCF4 peptide
MYPYDVPDYAPAAKRVKLDGSGSGSQPDPRPSGAGACCRFLPLQSQCPEGAGDAVMYASTECKAEVTPSQHGNRTFSYTLEDHTKQAFGIMNELRLSQQLCDVTLQVKYQDAPAAQFMAHKVVLASSSPVFKAMFTNGLREQGMEVVSIEGIHPKVMERLIEFAYTASISMGEKCVLHVMNGAVMYQIDSVVRACSDFLVQQLDPSNAIGIANFAEQIGCVELHQRAREYIYMHFGEVAKQEEFFNLSHCQLVTLISRDDLNVRCESEVFHACINWVKYDCEQRRFYVQALLRAVRCHSLTPNFLQMQLQKCEILQSDSRCKDYLVKIFEELTLHKPTQVMPCRAPGSGSGSDDLGANDELISFKDEGEQEEKSSENSSAERDLADVKSSLVNESET

SEQ ID NO: 777 - protein, 399 aa, synthetic construct
  source 1..399: note = HA-NLS-Keap1-(GS)4-TCF4 peptide
MYPYDVPDYAPAAKRVKLDGSGSGSQPDPRPSGAGACCRFLPLQSQCPEGAGDAVMYASTECKAEVTPSQHGNRTFSYTLEDHTKQAFGIMNELRLSQQLCDVTLQVKYQDAPAAQFMAHKVVLASSSPVFKAMFTNGLREQGMEVVSIEGIHPKVMERLIEFAYTASISMGEKCVLHVMNGAVMYQIDSVVRACSDFLVQQLDPSNAIGIANFAEQIGCVELHQRAREYIYMHFGEVAKQEEFFNLSHCQLVTLISRDDLNVRCESEVFHACINWVKYDCEQRRFYVQALLRAVRCHSLTPNFLQMQLQKCEILQSDSRCKDYLVKIFEELTLHKPTQVMPCRAPGSGSGSGSDDLGANDELISFKDEGEQEEKSSENSSAERDLADVKSSLVNESET

SEQ ID NO: 778 - protein, 401 aa, synthetic construct
  source 1..401: note = HA-NLS-Keap1-(GS)5-TCF4 peptide
MYPYDVPDYAPAAKRVKLDGSGSGSQPDPRPSGAGACCRFLPLQSQCPEGAGDAVMYASTECKAEVTPSQHGNRTFSYTLEDHTKQAFGIMNELRLSQQLCDVTLQVKYQDAPAAQFMAHKVVLASSSPVFKAMFTNGLREQGMEVVSIEGIHPKVMERLIEFAYTASISMGEKCVLHVMNGAVMYQIDSVVRACSDFLVQQLDPSNAIGIANFAEQIGCVELHQRAREYIYMHFGEVAKQEEFFNLSHCQLVTLISRDDLNVRCESEVFHACINWVKYDCEQRRFYVQALLRAVRCHSLTPNFLQMQLQKCEILQSDSRCKDYLVKIFEELTLHKPTQVMPCRAPGSGSGSGSGSDDLGANDELISFKDEGEQEEKSSENSSAERDLADVKSSLVNESET

SEQ ID NO: 779 - protein, 403 aa, synthetic construct
  source 1..403: note = HA-NLS-Keap1-(GS)6-TCF4 peptide
MYPYDVPDYAPAAKRVKLDGSGSGSQPDPRPSGAGACCRFLPLQSQCPEGAGDAVMYASTECKAEVTPSQHGNRTFSYTLEDHTKQAFGIMNELRLSQQLCDVTLQVKYQDAPAAQFMAHKVVLASSSPVFKAMFTNGLREQGMEVVSIEGIHPKVMERLIEFAYTASISMGEKCVLHVMNGAVMYQIDSVVRACSDFLVQQLDPSNAIGIANFAEQIGCVELHQRAREYIYMHFGEVAKQEEFFNLSHCQLVTLISRDDLNVRCESEVFHACINWVKYDCEQRRFYVQALLRAVRCHSLTPNFLQMQLQKCEILQSDSRCKDYLVKIFEELTLHKPTQVMPCRAPGSGSGSGSGSGSDDLGANDELISFKDEGEQEEKSSENSSAERDLADVKSSLVNESET

SEQ ID NO: 780 - protein, 189 aa, synthetic construct
  source 1..189: note = NLS-RNF125-(GS)1-TCF4 peptide
PAAKRVKLDGSGSGSGSVLSTDSGKSAPASATARALERRRDPELPVTSFDCAVCLEVLHQPVRTRCGHVFCRSCIATSLKNNKWTCPYCRAYLPSEGVPATDVAKRMKSEYKNCAECDTLVCLSEMRAHIRTCQKYIDKYGPGSDDLGANDELISFKDEGEQEEKSSENSSAERDLADVKSSLVNESET

SEQ ID NO: 781 - protein, 191 aa, synthetic construct
  source 1..191: note = NLS-RNF125-(GS)2-TCF4 peptide
PAAKRVKLDGSGSGSGSVLSTDSGKSAPASATARALERRRDPELPVTSFDCAVCLEVLHQPVRTRCGHVFCRSCIATSLKNNKWTCPYCRAYLPSEGVPATDVAKRMKSEYKNCAECDTLVCLSEMRAHIRTCQKYIDKYGPGSGSDDLGANDELISFKDEGEQEEKSSENSSAERDLADVKSSLVNESET

SEQ ID NO: 782 - protein, 193 aa, synthetic construct
  source 1..193: note = NLS-RNF125-(GS)3-TCF4 peptide
PAAKRVKLDGSGSGSGSVLSTDSGKSAPASATARALERRRDPELPVTSFDCAVCLEVLHQPVRTRCGHVFCRSCIATSLKNNKWTCPYCRAYLPSEGVPATDVAKRMKSEYKNCAECDTLVCLSEMRAHIRTCQKYIDKYGPGSGSGSDDLGANDELISFKDEGEQEEKSSENSSAERDLADVKSSLVNESET

SEQ ID NO: 783 - protein, 195 aa, synthetic construct
  source 1..195: note = NLS-RNF125-(GS)4-TCF4 peptide
PAAKRVKLDGSGSGSGSVLSTDSGKSAPASATARALERRRDPELPVTSFDCAVCLEVLHQPVRTRCGHVFCRSCIATSLKNNKWTCPYCRAYLPSEGVPATDVAKRMKSEYKNCAECDTLVCLSEMRAHIRTCQKYIDKYGPGSGSGSGSDDLGANDELISFKDEGEQEEKSSENSSAERDLADVKSSLVNESET

SEQ ID NO: 784 - protein, 197 aa, synthetic construct
  source 1..197: note = NLS-RNF125-(GS)5-TCF4 peptide
PAAKRVKLDGSGSGSGSVLSTDSGKSAPASATARALERRRDPELPVTSFDCAVCLEVLHQPVRTRCGHVFCRSCIATSLKNNKWTCPYCRAYLPSEGVPATDVAKRMKSEYKNCAECDTLVCLSEMRAHIRTCQKYIDKYGPGSGSGSGSGSDDLGANDELISFKDEGEQEEKSSENSSAERDLADVKSSLVNESET

SEQ ID NO: 785 - protein, 199 aa, synthetic construct
  source 1..199: note = NLS-RNF125-(GS)6-TCF4 peptide
PAAKRVKLDGSGSGSGSVLSTDSGKSAPASATARALERRRDPELPVTSFDCAVCLEVLHQPVRTRCGHVFCRSCIATSLKNNKWTCPYCRAYLPSEGVPATDVAKRMKSEYKNCAECDTLVCLSEMRAHIRTCQKYIDKYGPGSGSGSGSGSGSDDLGANDELISFKDEGEQEEKSSENSSAERDLADVKSSLVNESET

SEQ ID NO: 786 - protein, 199 aa, synthetic construct
  source 1..199: note = HA-NLS-RNF125-(GS)1-TCF4 peptide
MYPYDVPDYAPAAKRVKLDGSGSGSGSVLSTDSGKSAPASATARALERRRDPELPVTSFDCAVCLEVLHQPVRTRCGHVFCRSCIATSLKNNKWTCPYCRAYLPSEGVPATDVAKRMKSEYKNCAECDTLVCLSEMRAHIRTCQKYIDKYGPGSDDLGANDELISFKDEGEQEEKSSENSSAERDLADVKSSLVNESET

SEQ ID NO: 787 - protein, 201 aa, synthetic construct
  source 1..201: note = HA-NLS-RNF125-(GS)2-TCF4 peptide
MYPYDVPDYAPAAKRVKLDGSGSGSGSVLSTDSGKSAPASATARALERRRDPELPVTSFDCAVCLEVLHQPVRTRCGHVFCRSCIATSLKNNKWTCPYCRAYLPSEGVPATDVAKRMKSEYKNCAECDTLVCLSEMRAHIRTCQKYIDKYGPGSGSDDLGANDELISFKDEGEQEEKSSENSSAERDLADVKSSLVNESET

SEQ ID NO: 788 - protein, 203 aa, synthetic construct
  source 1..203: note = HA-NLS-RNF125-(GS)3-TCF4 peptide
MYPYDVPDYAPAAKRVKLDGSGSGSGSVLSTDSGKSAPASATARALERRRDPELPVTSFDCAVCLEVLHQPVRTRCGHVFCRSCIATSLKNNKWTCPYCRAYLPSEGVPATDVAKRMKSEYKNCAECDTLVCLSEMRAHIRTCQKYIDKYGPGSGSGSDDLGANDELISFKDEGEQEEKSSENSSAERDLADVKSSLVNESET

SEQ ID NO: 789 - protein, 205 aa, synthetic construct
  source 1..205: note = HA-NLS-RNF125-(GS)4-TCF4 peptide
MYPYDVPDYAPAAKRVKLDGSGSGSGSVLSTDSGKSAPASATARALERRRDPELPVTSFDCAVCLEVLHQPVRTRCGHVFCRSCIATSLKNNKWTCPYCRAYLPSEGVPATDVAKRMKSEYKNCAECDTLVCLSEMRAHIRTCQKYIDKYGPGSGSGSGSDDLGANDELISFKDEGEQEEKSSENSSAERDLADVKSSLVNESET

SEQ ID NO: 790 - protein, 207 aa, synthetic construct
  source 1..207: note = HA-NLS-RNF125-(GS)5-TCF4 peptide
MYPYDVPDYAPAAKRVKLDGSGSGSGSVLSTDSGKSAPASATARALERRRDPELPVTSFDCAVCLEVLHQPVRTRCGHVFCRSCIATSLKNNKWTCPYCRAYLPSEGVPATDVAKRMKSEYKNCAECDTLVCLSEMRAHIRTCQKYIDKYGPGSGSGSGSGSDDLGANDELISFKDEGEQEEKSSENSSAERDLADVKSSLVNESET

SEQ ID NO: 791 - protein, 209 aa, synthetic construct
  source 1..209: note = HA-NLS-RNF125-(GS)6-TCF4 peptide
MYPYDVPDYAPAAKRVKLDGSGSGSGSVLSTDSGKSAPASATARALERRRDPELPVTSFDCAVCLEVLHQPVRTRCGHVFCRSCIATSLKNNKWTCPYCRAYLPSEGVPATDVAKRMKSEYKNCAECDTLVCLSEMRAHIRTCQKYIDKYGPGSGSGSGSGSGSDDLGANDELISFKDEGEQEEKSSENSSAERDLADVKSSLVNESET

SEQ ID NO: 792 - protein, 289 aa, synthetic construct
  source 1..289: note = TCF4-(GS)1-SPOP-NLS peptide
MDDLGANDELISFKDEGEQEEKSSENSSAERDLADVKSSLVNESETGSNGLLPDDKLTLFCEVSVVQDSVNISGQNTMNMVKVPECRLADELGGLWENSRFTDCCLCVAGQEFQAHKAILAARSPVFSAMFEHEMEESKKNRVEINDVEPEVFKEMMCFIYTGKAPNLDKMADDLLAAADKYALERLKVMCEDALCSNLSVENAAEILILADLHSADQLKTQAVDFINYHASDVLETSGWKSMVVSHPHLVAEAYRSLASAQCPFLGPPRKRLKQSGSGSPAAKRVKLD

SEQ ID NO: 793 - protein, 291 aa, synthetic construct
  source 1..291: note = TCF4-(GS)2-SPOP-NLS peptide
MDDLGANDELISFKDEGEQEEKSSENSSAERDLADVKSSLVNESETGSGSNGLLPDDKLTLFCEVSVVQDSVNISGQNTMNMVKVPECRLADELGGLWENSRFTDCCLCVAGQEFQAHKAILAARSPVFSAMFEHEMEESKKNRVEINDVEPEVFKEMMCFIYTGKAPNLDKMADDLLAAADKYALERLKVMCEDALCSNLSVENAAEILILADLHSADQLKTQAVDFINYHASDVLETSGWKSMVVSHPHLVAEAYRSLASAQCPFLGPPRKRLKQSGSGSPAAKRVKLD

SEQ ID NO: 794 - protein, 293 aa, synthetic construct
  source 1..293: note = TCF4-(GS)3-SPOP-NLS peptide
MDDLGANDELISFKDEGEQEEKSSENSSAERDLADVKSSLVNESETGSGSGSNGLLPDDKLTLFCEVSVVQDSVNISGQNTMNMVKVPECRLADELGGLWENSRFTDCCLCVAGQEFQAHKAILAARSPVFSAMFEHEMEESKKNRVEINDVEPEVFKEMMCFIYTGKAPNLDKMADDLLAAADKYALERLKVMCEDALCSNLSVENAAEILILADLHSADQLKTQAVDFINYHASDVLETSGWKSMVVSHPHLVAEAYRSLASAQCPFLGPPRKRLKQSGSGSPAAKRVKLD

SEQ ID NO: 795 - protein, 295 aa, synthetic construct
  source 1..295: note = TCF4-(GS)4-SPOP-NLS peptide
MDDLGANDELISFKDEGEQEEKSSENSSAERDLADVKSSLVNESETGSGSGSGSNGLLPDDKLTLFCEVSVVQDSVNISGQNTMNMVKVPECRLADELGGLWENSRFTDCCLCVAGQEFQAHKAILAARSPVFSAMFEHEMEESKKNRVEINDVEPEVFKEMMCFIYTGKAPNLDKMADDLLAAADKYALERLKVMCEDALCSNLSVENAAEILILADLHSADQLKTQAVDFINYHASDVLETSGWKSMVVSHPHLVAEAYRSLASAQCPFLGPPRKRLKQSGSGSPAAKRVKLD

SEQ ID NO: 796 - protein, 298 aa, synthetic construct
  source 1..298: note = TCF4-(GS)5-SPOP-NLS peptide
MDDLGANDELISFKDEGEQEEKSSENSSAERDLADVKSSLVNESETGSGSGSGSGSNGLLPDDKLTLFCEVSVVQDSVNISGQNTMNMVKVPECRLADELGGLWENSRFTDCCLCVAGQEFQAHKAILAARSPVFSAMFEHEMEESKKNRVEINDVEPEVFKEMMCFIYTGKAPNLDKMADDLLAAADKYALERLKVMCEDALCSNLSVENAAEILILADLHSADQLKTQAVDFINYHASDVLETSGWKSMVVSHPHLVAEAYRSLASAQCPFLGPPRKRLKQSGSGSPAAKRVKLDA

SEQ ID NO: 797 - protein, 299 aa, synthetic construct
  source 1..299: note = TCF4-(GS)6-SPOP-NLS peptide
MDDLGANDELISFKDEGEQEEKSSENSSAERDLADVKSSLVNESETGSGSGSGSGSGSNGLLPDDKLTLFCEVSVVQDSVNISGQNTMNMVKVPECRLADELGGLWENSRFTDCCLCVAGQEFQAHKAILAARSPVFSAMFEHEMEESKKNRVEINDVEPEVFKEMMCFIYTGKAPNLDKMADDLLAAADKYALERLKVMCEDALCSNLSVENAAEILILADLHSADQLKTQAVDFINYHASDVLETSGWKSMVVSHPHLVAEAYRSLASAQCPFLGPPRKRLKQSGSGSPAAKRVKLD

SEQ ID NO: 798 - protein, 298 aa, synthetic construct
  source 1..298: note = TCF4-(GS)1-SPOP-NLS-HA peptide
MDDLGANDELISFKDEGEQEEKSSENSSAERDLADVKSSLVNESETGSNGLLPDDKLTLFCEVSVVQDSVNISGQNTMNMVKVPECRLADELGGLWENSRFTDCCLCVAGQEFQAHKAILAARSPVFSAMFEHEMEESKKNRVEINDVEPEVFKEMMCFIYTGKAPNLDKMADDLLAAADKYALERLKVMCEDALCSNLSVENAAEILILADLHSADQLKTQAVDFINYHASDVLETSGWKSMVVSHPHLVAEAYRSLASAQCPFLGPPRKRLKQSGSGSPAAKRVKLDYPYDVPDYA

SEQ ID NO: 799 - protein, 300 aa, synthetic construct
  source 1..300: note = TCF4-(GS)2-SPOP-NLS-HA peptide
MDDLGANDELISFKDEGEQEEKSSENSSAERDLADVKSSLVNESETGSGSNGLLPDDKLTLFCEVSVVQDSVNISGQNTMNMVKVPECRLADELGGLWENSRFTDCCLCVAGQEFQAHKAILAARSPVFSAMFEHEMEESKKNRVEINDVEPEVFKEMMCFIYTGKAPNLDKMADDLLAAADKYALERLKVMCEDALCSNLSVENAAEILILADLHSADQLKTQAVDFINYHASDVLETSGWKSMVVSHPHLVAEAYRSLASAQCPFLGPPRKRLKQSGSGSPAAKRVKLDYPYDVPDYA

SEQ ID NO: 800 - protein, 302 aa, synthetic construct
  source 1..302: note = TCF4-(GS)3-SPOP-NLS-HA peptide
MDDLGANDELISFKDEGEQEEKSSENSSAERDLADVKSSLVNESETGSGSGSNGLLPDDKLTLFCEVSVVQDSVNISGQNTMNMVKVPECRLADELGGLWENSRFTDCCLCVAGQEFQAHKAILAARSPVFSAMFEHEMEESKKNRVEINDVEPEVFKEMMCFIYTGKAPNLDKMADDLLAAADKYALERLKVMCEDALCSNLSVENAAEILILADLHSADQLKTQAVDFINYHASDVLETSGWKSMVVSHPHLVAEAYRSLASAQCPFLGPPRKRLKQSGSGSPAAKRVKLDYPYDVPDYA

SEQ ID NO: 801 - protein, 304 aa, synthetic construct
  source 1..304: note = TCF4-(GS)4-SPOP-NLS-HA peptide
MDDLGANDELISFKDEGEQEEKSSENSSAERDLADVKSSLVNESETGSGSGSGSNGLLPDDKLTLFCEVSVVQDSVNISGQNTMNMVKVPECRLADELGGLWENSRFTDCCLCVAGQEFQAHKAILAARSPVFSAMFEHEMEESKKNRVEINDVEPEVFKEMMCFIYTGKAPNLDKMADDLLAAADKYALERLKVMCEDALCSNLSVENAAEILILADLHSADQLKTQAVDFINYHASDVLETSGWKSMVVSHPHLVAEAYRSLASAQCPFLGPPRKRLKQSGSGSPAAKRVKLDYPYDVPDYA

SEQ ID NO: 802 - protein, 307 aa, synthetic construct
  source 1..307: note = TCF4-(GS)5-SPOP-NLS-HA peptide
MDDLGANDELISFKDEGEQEEKSSENSSAERDLADVKSSLVNESETGSGSGSGSGSNGLLPDDKLTLFCEVSVVQDSVNISGQNTMNMVKVPECRLADELGGLWENSRFTDCCLCVAGQEFQAHKAILAARSPVFSAMFEHEMEESKKNRVEINDVEPEVFKEMMCFIYTGKAPNLDKMADDLLAAADKYALERLKVMCEDALCSNLSVENAAEILILADLHSADQLKTQAVDFINYHASDVLETSGWKSMVVSHPHLVAEAYRSLASAQCPFLGPPRKRLKQSGSGSPAAKRVKLDYPYDVPDYAA

SEQ ID NO: 803 - protein, 308 aa, synthetic construct
  source 1..308: note = TCF4-(GS)6-SPOP-NLS-HA peptide
MDDLGANDELISFKDEGEQEEKSSENSSAERDLADVKSSLVNESETGSGSGSGSGSGSNGLLPDDKLTLFCEVSVVQDSVNISGQNTMNMVKVPECRLADELGGLWENSRFTDCCLCVAGQEFQAHKAILAARSPVFSAMFEHEMEESKKNRVEINDVEPEVFKEMMCFIYTGKAPNLDKMADDLLAAADKYALERLKVMCEDALCSNLSVENAAEILILADLHSADQLKTQAVDFINYHASDVLETSGWKSMVVSHPHLVAEAYRSLASAQCPFLGPPRKRLKQSGSGSPAAKRVKLDYPYDVPDYA

SEQ ID NO: 804 - protein, 157 aa, synthetic construct
  source 1..157: note = NLS-TCF4-(GS)1-RNF114 peptide
PAAKRVKLDGSGSGSDDLGANDELISFKDEGEQEEKSSENSSAERDLADVKSSLVNESETGSGRFTCPVCLEVYEKPVQVPCGHVFCSACLQECLKPKKPVCGVCRSALAPGVRAVELERQIESTETSCHGCRKNFFLSKIRSHVATCSKYQNYIME

SEQ ID NO: 805 - protein, 159 aa, synthetic construct
  source 1..159: note = NLS-TCF4-(GS)2-RNF114 peptide
PAAKRVKLDGSGSGSDDLGANDELISFKDEGEQEEKSSENSSAERDLADVKSSLVNESETGSGSGRFTCPVCLEVYEKPVQVPCGHVFCSACLQECLKPKKPVCGVCRSALAPGVRAVELERQIESTETSCHGCRKNFFLSKIRSHVATCSKYQNYIME

SEQ ID NO: 806 - protein, 161 aa, synthetic construct
  source 1..161: note = NLS-TCF4-(GS)3-RNF114 peptide
PAAKRVKLDGSGSGSDDLGANDELISFKDEGEQEEKSSENSSAERDLADVKSSLVNESETGSGSGSGRFTCPVCLEVYEKPVQVPCGHVFCSACLQECLKPKKPVCGVCRSALAPGVRAVELERQIESTETSCHGCRKNFFLSKIRSHVATCSKYQNYIME

SEQ ID NO: 807 - protein, 163 aa, synthetic construct
  source 1..163: note = NLS-TCF4-(GS)4-RNF114 peptide
PAAKRVKLDGSGSGSDDLGANDELISFKDEGEQEEKSSENSSAERDLADVKSSLVNESETGSGSGSGSGRFTCPVCLEVYEKPVQVPCGHVFCSACLQECLKPKKPVCGVCRSALAPGVRAVELERQIESTETSCHGCRKNFFLSKIRSHVATCSKYQNYIME

SEQ ID NO: 808 - protein, 165 aa, synthetic construct
  source 1..165: note = NLS-TCF4-(GS)5-RNF114 peptide
PAAKRVKLDGSGSGSDDLGANDELISFKDEGEQEEKSSENSSAERDLADVKSSLVNESETGSGSGSGSGSGRFTCPVCLEVYEKPVQVPCGHVFCSACLQECLKPKKPVCGVCRSALAPGVRAVELERQIESTETSCHGCRKNFFLSKIRSHVATCSKYQNYIME

SEQ ID NO: 809 - protein, 167 aa, synthetic construct
  source 1..167: note = NLS-TCF4-(GS)6-RNF114 peptide
PAAKRVKLDGSGSGSDDLGANDELISFKDEGEQEEKSSENSSAERDLADVKSSLVNESETGSGSGSGSGSGSGRFTCPVCLEVYEKPVQVPCGHVFCSACLQECLKPKKPVCGVCRSALAPGVRAVELERQIESTETSCHGCRKNFFLSKIRSHVATCSKYQNYIME

SEQ ID NO: 810 - protein, 167 aa, synthetic construct
  source 1..167: note = HA-NLS-TCF4-(GS)1-RNF114 peptide
MYPYDVPDYAPAAKRVKLDGSGSGSDDLGANDELISFKDEGEQEEKSSENSSAERDLADVKSSLVNESETGSGRFTCPVCLEVYEKPVQVPCGHVFCSACLQECLKPKKPVCGVCRSALAPGVRAVELERQIESTETSCHGCRKNFFLSKIRSHVATCSKYQNYIME

SEQ ID NO: 811 - protein, 169 aa, synthetic construct
  source 1..169: note = HA-NLS-TCF4-(GS)2-RNF114 peptide
MYPYDVPDYAPAAKRVKLDGSGSGSDDLGANDELISFKDEGEQEEKSSENSSAERDLADVKSSLVNESETGSGSGRFTCPVCLEVYEKPVQVPCGHVFCSACLQECLKPKKPVCGVCRSALAPGVRAVELERQIESTETSCHGCRKNFFLSKIRSHVATCSKYQNYIME

SEQ ID NO: 812 - protein, 171 aa, synthetic construct
  source 1..171: note = HA-NLS-TCF4-(GS)3-RNF114 peptide
MYPYDVPDYAPAAKRVKLDGSGSGSDDLGANDELISFKDEGEQEEKSSENSSAERDLADVKSSLVNESETGSGSGSGRFTCPVCLEVYEKPVQVPCGHVFCSACLQECLKPKKPVCGVCRSALAPGVRAVELERQIESTETSCHGCRKNFFLSKIRSHVATCSKYQNYIME

SEQ ID NO: 813 - protein, 173 aa, synthetic construct
  source 1..173: note = HA-NLS-TCF4-(GS)4-RNF114 peptide
MYPYDVPDYAPAAKRVKLDGSGSGSDDLGANDELISFKDEGEQEEKSSENSSAERDLADVKSSLVNESETGSGSGSGSGRFTCPVCLEVYEKPVQVPCGHVFCSACLQECLKPKKPVCGVCRSALAPGVRAVELERQIESTETSCHGCRKNFFLSKIRSHVATCSKYQNYIME

SEQ ID NO: 814 - protein, 175 aa, synthetic construct
  source 1..175: note = HA-NLS-TCF4-(GS)5-RNF114 peptide
MYPYDVPDYAPAAKRVKLDGSGSGSDDLGANDELISFKDEGEQEEKSSENSSAERDLADVKSSLVNESETGSGSGSGSGSGRFTCPVCLEVYEKPVQVPCGHVFCSACLQECLKPKKPVCGVCRSALAPGVRAVELERQIESTETSCHGCRKNFFLSKIRSHVATCSKYQNYIME

SEQ ID NO: 815 - protein, 177 aa, synthetic construct
  source 1..177: note = HA-NLS-TCF4-(GS)6-RNF114 peptide
MYPYDVPDYAPAAKRVKLDGSGSGSDDLGANDELISFKDEGEQEEKSSENSSAERDLADVKSSLVNESETGSGSGSGSGSGSGRFTCPVCLEVYEKPVQVPCGHVFCSACLQECLKPKKPVCGVCRSALAPGVRAVELERQIESTETSCHGCRKNFFLSKIRSHVATCSKYQNYIME

SEQ ID NO: 816 - protein, 158 aa, synthetic construct
  source 1..158: note = RNF114-(GS)1-TCF4-NLS peptide
MGRFTCPVCLEVYEKPVQVPCGHVFCSACLQECLKPKKPVCGVCRSALAPGVRAVELERQIESTETSCHGCRKNFFLSKIRSHVATCSKYQNYIMEGSDDLGANDELISFKDEGEQEEKSSENSSAERDLADVKSSLVNESETGSGSGSPAAKRVKLD

SEQ ID NO: 817 - protein, 160 aa, synthetic construct
  source 1..160: note = RNF114-(GS)2-TCF4-NLS peptide
MGRFTCPVCLEVYEKPVQVPCGHVFCSACLQECLKPKKPVCGVCRSALAPGVRAVELERQIESTETSCHGCRKNFFLSKIRSHVATCSKYQNYIMEGSGSDDLGANDELISFKDEGEQEEKSSENSSAERDLADVKSSLVNESETGSGSGSPAAKRVKLD

SEQ ID NO: 818 - protein, 162 aa, synthetic construct
  source 1..162: note = RNF114-(GS)3-TCF4-NLS peptide
MGRFTCPVCLEVYEKPVQVPCGHVFCSACLQECLKPKKPVCGVCRSALAPGVRAVELERQIESTETSCHGCRKNFFLSKIRSHVATCSKYQNYIMEGSGSGSDDLGANDELISFKDEGEQEEKSSENSSAERDLADVKSSLVNESETGSGSGSPAAKRVKLD

SEQ ID NO: 819 - protein, 164 aa, synthetic construct
  source 1..164: note = RNF114-(GS)4-TCF4-NLS peptide
MGRFTCPVCLEVYEKPVQVPCGHVFCSACLQECLKPKKPVCGVCRSALAPGVRAVELERQIESTETSCHGCRKNFFLSKIRSHVATCSKYQNYIMEGSGSGSGSDDLGANDELISFKDEGEQEEKSSENSSAERDLADVKSSLVNESETGSGSGSPAAKRVKLD

SEQ ID NO: 820 - protein, 166 aa, synthetic construct
  source 1..166: note = RNF114-(GS)5-TCF4-NLS peptide
MGRFTCPVCLEVYEKPVQVPCGHVFCSACLQECLKPKKPVCGVCRSALAPGVRAVELERQIESTETSCHGCRKNFFLSKIRSHVATCSKYQNYIMEGSGSGSGSGSDDLGANDELISFKDEGEQEEKSSENSSAERDLADVKSSLVNESETGSGSGSPAAKRVKLD

SEQ ID NO: 821 - protein, 168 aa, synthetic construct
  source 1..168: note = RNF114-(GS)6-TCF4-NLS peptide
MGRFTCPVCLEVYEKPVQVPCGHVFCSACLQECLKPKKPVCGVCRSALAPGVRAVELERQIESTETSCHGCRKNFFLSKIRSHVATCSKYQNYIMEGSGSGSGSGSGSDDLGANDELISFKDEGEQEEKSSENSSAERDLADVKSSLVNESETGSGSGSPAAKRVKLD

SEQ ID NO: 822 - protein, 167 aa, synthetic construct
  source 1..167: note = RNF114-(GS)1-TCF4-NLS-HA peptide
MGRFTCPVCLEVYEKPVQVPCGHVFCSACLQECLKPKKPVCGVCRSALAPGVRAVELERQIESTETSCHGCRKNFFLSKIRSHVATCSKYQNYIMEGSDDLGANDELISFKDEGEQEEKSSENSSAERDLADVKSSLVNESETGSGSGSPAAKRVKLDYPYDVPDYA

SEQ ID NO: 823 - protein, 169 aa, synthetic construct
  source 1..169: note = RNF114-(GS)2-TCF4-NLS-HA peptide
MGRFTCPVCLEVYEKPVQVPCGHVFCSACLQECLKPKKPVCGVCRSALAPGVRAVELERQIESTETSCHGCRKNFFLSKIRSHVATCSKYQNYIMEGSGSDDLGANDELISFKDEGEQEEKSSENSSAERDLADVKSSLVNESETGSGSGSPAAKRVKLDYPYDVPDYA

SEQ ID NO: 824 - protein, 171 aa, synthetic construct
  source 1..171: note = RNF114-(GS)3-TCF4-NLS-HA peptide
MGRFTCPVCLEVYEKPVQVPCGHVFCSACLQECLKPKKPVCGVCRSALAPGVRAVELERQIESTETSCHGCRKNFFLSKIRSHVATCSKYQNYIMEGSGSGSDDLGANDELISFKDEGEQEEKSSENSSAERDLADVKSSLVNESETGSGSGSPAAKRVKLDYPYDVPDYA

SEQ ID NO: 825 - protein, 173 aa, synthetic construct
  source 1..173: note = RNF114-(GS)4-TCF4-NLS-HA peptide
MGRFTCPVCLEVYEKPVQVPCGHVFCSACLQECLKPKKPVCGVCRSALAPGVRAVELERQIESTETSCHGCRKNFFLSKIRSHVATCSKYQNYIMEGSGSGSGSDDLGANDELISFKDEGEQEEKSSENSSAERDLADVKSSLVNESETGSGSGSPAAKRVKLDYPYDVPDYA

SEQ ID NO: 826 - protein, 175 aa, synthetic construct
  source 1..175: note = RNF114-(GS)5-TCF4-NLS-HA peptide
MGRFTCPVCLEVYEKPVQVPCGHVFCSACLQECLKPKKPVCGVCRSALAPGVRAVELERQIESTETSCHGCRKNFFLSKIRSHVATCSKYQNYIMEGSGSGSGSGSDDLGANDELISFKDEGEQEEKSSENSSAERDLADVKSSLVNESETGSGSGSPAAKRVKLDYPYDVPDYA

SEQ ID NO: 827 - protein, 177 aa, synthetic construct
  source 1..177: note = RNF114-(GS)6-TCF4-NLS-HA peptide
MGRFTCPVCLEVYEKPVQVPCGHVFCSACLQECLKPKKPVCGVCRSALAPGVRAVELERQIESTETSCHGCRKNFFLSKIRSHVATCSKYQNYIMEGSGSGSGSGSGSDDLGANDELISFKDEGEQEEKSSENSSAERDLADVKSSLVNESETGSGSGSPAAKRVKLDYPYDVPDYA

SEQ ID NO: 828 - protein, 162 aa, synthetic construct
  source 1..162: note = NLS-TCF4-(GS)1-RNF138 peptide
PAAKRVKLDGSGSGSDDLGANDELISFKDEGEQEEKSSENSSAERDLADVKSSLVNESETGSDDFYCPVCQEVLKTPVRTTACQHVFCRKCFLTAMRESGAHCPLCRGNVTRRERACPERALDLENIMRKFSGSCRCCAKQIKFYRMRHHYKSCKKYQDEYG

SEQ ID NO: 829 - protein, 164 aa, synthetic construct
  source 1..164: note = NLS-TCF4-(GS)2-RNF138 peptide
PAAKRVKLDGSGSGSDDLGANDELISFKDEGEQEEKSSENSSAERDLADVKSSLVNESETGSGSDDFYCPVCQEVLKTPVRTTACQHVFCRKCFLTAMRESGAHCPLCRGNVTRRERACPERALDLENIMRKFSGSCRCCAKQIKFYRMRHHYKSCKKYQDEYG

SEQ ID NO: 830 - protein, 166 aa, synthetic construct
  source 1..166: note = NLS-TCF4-(GS)3-RNF138 peptide
PAAKRVKLDGSGSGSDDLGANDELISFKDEGEQEEKSSENSSAERDLADVKSSLVNESETGSGSGSDDFYCPVCQEVLKTPVRTTACQHVFCRKCFLTAMRESGAHCPLCRGNVTRRERACPERALDLENIMRKFSGSCRCCAKQIKFYRMRHHYKSCKKYQDEYG

SEQ ID NO: 831 - protein, 168 aa, synthetic construct
  source 1..168: note = NLS-TCF4-(GS)4-RNF138 peptide
PAAKRVKLDGSGSGSDDLGANDELISFKDEGEQEEKSSENSSAERDLADVKSSLVNESETGSGSGSGSDDFYCPVCQEVLKTPVRTTACQHVFCRKCFLTAMRESGAHCPLCRGNVTRRERACPERALDLENIMRKFSGSCRCCAKQIKFYRMRHHYKSCKKYQDEYG

SEQ ID NO: 832 - protein, 170 aa, synthetic construct
  source 1..170: note = NLS-TCF4-(GS)5-RNF138 peptide
PAAKRVKLDGSGSGSDDLGANDELISFKDEGEQEEKSSENSSAERDLADVKSSLVNESETGSGSGSGSGSDDFYCPVCQEVLKTPVRTTACQHVFCRKCFLTAMRESGAHCPLCRGNVTRRERACPERALDLENIMRKFSGSCRCCAKQIKFYRMRHHYKSCKKYQDEYG

SEQ ID NO: 833 - protein, 172 aa, synthetic construct
  source 1..172: note = NLS-TCF4-(GS)6-RNF138 peptide
PAAKRVKLDGSGSGSDDLGANDELISFKDEGEQEEKSSENSSAERDLADVKSSLVNESETGSGSGSGSGSGSDDFYCPVCQEVLKTPVRTTACQHVFCRKCFLTAMRESGAHCPLCRGNVTRRERACPERALDLENIMRKFSGSCRCCAKQIKFYRMRHHYKSCKKYQDEYG

SEQ ID NO: 834 - protein, 172 aa, synthetic construct
  source 1..172: note = HA-NLS-TCF4-(GS)1-RNF138 peptide
MYPYDVPDYAPAAKRVKLDGSGSGSDDLGANDELISFKDEGEQEEKSSENSSAERDLADVKSSLVNESETGSDDFYCPVCQEVLKTPVRTTACQHVFCRKCFLTAMRESGAHCPLCRGNVTRRERACPERALDLENIMRKFSGSCRCCAKQIKFYRMRHHYKSCKKYQDEYG

SEQ ID NO: 835 - protein, 174 aa, synthetic construct
  source 1..174: note = HA-NLS-TCF4-(GS)2-RNF138 peptide
MYPYDVPDYAPAAKRVKLDGSGSGSDDLGANDELISFKDEGEQEEKSSENSSAERDLADVKSSLVNESETGSGSDDFYCPVCQEVLKTPVRTTACQHVFCRKCFLTAMRESGAHCPLCRGNVTRRERACPERALDLENIMRKFSGSCRCCAKQIKFYRMRHHYKSCKKYQDEYG

SEQ ID NO: 836 - protein, 176 aa, synthetic construct
  source 1..176: note = HA-NLS-TCF4-(GS)3-RNF138 peptide
MYPYDVPDYAPAAKRVKLDGSGSGSDDLGANDELISFKDEGEQEEKSSENSSAERDLADVKSSLVNESETGSGSGSDDFYCPVCQEVLKTPVRTTACQHVFCRKCFLTAMRESGAHCPLCRGNVTRRERACPERALDLENIMRKFSGSCRCCAKQIKFYRMRHHYKSCKKYQDEYG

SEQ ID NO: 837 - protein, 178 aa, synthetic construct
  source 1..178: note = HA-NLS-TCF4-(GS)4-RNF138 peptide
MYPYDVPDYAPAAKRVKLDGSGSGSDDLGANDELISFKDEGEQEEKSSENSSAERDLADVKSSLVNESETGSGSGSGSDDFYCPVCQEVLKTPVRTTACQHVFCRKCFLTAMRESGAHCPLCRGNVTRRERACPERALDLENIMRKFSGSCRCCAKQIKFYRMRHHYKSCKKYQDEYG

SEQ ID NO: 838 - protein, 180 aa, synthetic construct
  source 1..180: note = HA-NLS-TCF4-(GS)5-RNF138 peptide
MYPYDVPDYAPAAKRVKLDGSGSGSDDLGANDELISFKDEGEQEEKSSENSSAERDLADVKSSLVNESETGSGSGSGSGSDDFYCPVCQEVLKTPVRTTACQHVFCRKCFLTAMRESGAHCPLCRGNVTRRERACPERALDLENIMRKFSGSCRCCAKQIKFYRMRHHYKSCKKYQDEYG

SEQ ID NO: 839 - protein, 182 aa, synthetic construct
  source 1..182: note = HA-NLS-TCF4-(GS)6-RNF138 peptide
MYPYDVPDYAPAAKRVKLDGSGSGSDDLGANDELISFKDEGEQEEKSSENSSAERDLADVKSSLVNESETGSGSGSGSGSGSDDFYCPVCQEVLKTPVRTTACQHVFCRKCFLTAMRESGAHCPLCRGNVTRRERACPERALDLENIMRKFSGSCRCCAKQIKFYRMRHHYKSCKKYQDEYG

SEQ ID NO: 840 - protein, 163 aa, synthetic construct
  source 1..163: note = RNF138-(GS)1-TCF4-NLS peptide
MDDFYCPVCQEVLKTPVRTTACQHVFCRKCFLTAMRESGAHCPLCRGNVTRRERACPERALDLENIMRKFSGSCRCCAKQIKFYRMRHHYKSCKKYQDEYGGSDDLGANDELISFKDEGEQEEKSSENSSAERDLADVKSSLVNESETGSGSGSPAAKRVKLD

SEQ ID NO: 841 - protein, 165 aa, synthetic construct
  source 1..165: note = RNF138-(GS)2-TCF4-NLS peptide
MDDFYCPVCQEVLKTPVRTTACQHVFCRKCFLTAMRESGAHCPLCRGNVTRRERACPERALDLENIMRKFSGSCRCCAKQIKFYRMRHHYKSCKKYQDEYGGSGSDDLGANDELISFKDEGEQEEKSSENSSAERDLADVKSSLVNESETGSGSGSPAAKRVKLD

SEQ ID NO: 842 - protein, 167 aa, synthetic construct
  source 1..167: note = RNF138-(GS)3-TCF4-NLS peptide
MDDFYCPVCQEVLKTPVRTTACQHVFCRKCFLTAMRESGAHCPLCRGNVTRRERACPERALDLENIMRKFSGSCRCCAKQIKFYRMRHHYKSCKKYQDEYGGSGSGSDDLGANDELISFKDEGEQEEKSSENSSAERDLADVKSSLVNESETGSGSGSPAAKRVKLD

SEQ ID NO: 843 - protein, 169 aa, synthetic construct
  source 1..169: note = RNF138-(GS)4-TCF4-NLS peptide
MDDFYCPVCQEVLKTPVRTTACQHVFCRKCFLTAMRESGAHCPLCRGNVTRRERACPERALDLENIMRKFSGSCRCCAKQIKFYRMRHHYKSCKKYQDEYGGSGSGSGSDDLGANDELISFKDEGEQEEKSSENSSAERDLADVKSSLVNESETGSGSGSPAAKRVKLD

SEQ ID NO: 844 - protein, 171 aa, synthetic construct
  source 1..171: note = RNF138-(GS)5-TCF4-NLS peptide
MDDFYCPVCQEVLKTPVRTTACQHVFCRKCFLTAMRESGAHCPLCRGNVTRRERACPERALDLENIMRKFSGSCRCCAKQIKFYRMRHHYKSCKKYQDEYGGSGSGSGSGSDDLGANDELISFKDEGEQEEKSSENSSAERDLADVKSSLVNESETGSGSGSPAAKRVKLD

SEQ ID NO: 845 - protein, 173 aa, synthetic construct
  source 1..173: note = RNF138-(GS)6-TCF4-NLS peptide
MDDFYCPVCQEVLKTPVRTTACQHVFCRKCFLTAMRESGAHCPLCRGNVTRRERACPERALDLENIMRKFSGSCRCCAKQIKFYRMRHHYKSCKKYQDEYGGSGSGSGSGSGSDDLGANDELISFKDEGEQEEKSSENSSAERDLADVKSSLVNESETGSGSGSPAAKRVKLD

SEQ ID NO: 846 - protein, 172 aa, synthetic construct
  source 1..172: note = RNF138-(GS)1-TCF4-NLS-HA peptide
MDDFYCPVCQEVLKTPVRTTACQHVFCRKCFLTAMRESGAHCPLCRGNVTRRERACPERALDLENIMRKFSGSCRCCAKQIKFYRMRHHYKSCKKYQDEYGGSDDLGANDELISFKDEGEQEEKSSENSSAERDLADVKSSLVNESETGSGSGSPAAKRVKLDYPYDVPDYA

SEQ ID NO: 847 - protein, 174 aa, synthetic construct
  source 1..174: note = RNF138-(GS)2-TCF4-NLS-HA peptide
MDDFYCPVCQEVLKTPVRTTACQHVFCRKCFLTAMRESGAHCPLCRGNVTRRERACPERALDLENIMRKFSGSCRCCAKQIKFYRMRHHYKSCKKYQDEYGGSGSDDLGANDELISFKDEGEQEEKSSENSSAERDLADVKSSLVNESETGSGSGSPAAKRVKLDYPYDVPDYA

SEQ ID NO: 848 - protein, 176 aa, synthetic construct
  source 1..176: note = RNF138-(GS)3-TCF4-NLS-HA peptide
MDDFYCPVCQEVLKTPVRTTACQHVFCRKCFLTAMRESGAHCPLCRGNVTRRERACPERALDLENIMRKFSGSCRCCAKQIKFYRMRHHYKSCKKYQDEYGGSGSGSDDLGANDELISFKDEGEQEEKSSENSSAERDLADVKSSLVNESETGSGSGSPAAKRVKLDYPYDVPDYA

SEQ ID NO: 849 - protein, 178 aa, synthetic construct
  source 1..178: note = RNF138-(GS)4-TCF4-NLS-HA peptide
MDDFYCPVCQEVLKTPVRTTACQHVFCRKCFLTAMRESGAHCPLCRGNVTRRERACPERALDLENIMRKFSGSCRCCAKQIKFYRMRHHYKSCKKYQDEYGGSGSGSGSDDLGANDELISFKDEGEQEEKSSENSSAERDLADVKSSLVNESETGSGSGSPAAKRVKLDYPYDVPDYA

SEQ ID NO: 850 - protein, 180 aa, synthetic construct
  source 1..180: note = RNF138-(GS)5-TCF4-NLS-HA peptide
MDDFYCPVCQEVLKTPVRTTACQHVFCRKCFLTAMRESGAHCPLCRGNVTRRERACPERALDLENIMRKFSGSCRCCAKQIKFYRMRHHYKSCKKYQDEYGGSGSGSGSGSDDLGANDELISFKDEGEQEEKSSENSSAERDLADVKSSLVNESETGSGSGSPAAKRVKLDYPYDVPDYA

SEQ ID NO: 851 - protein, 182 aa, synthetic construct
  source 1..182: note = RNF138-(GS)6-TCF4-NLS-HA peptide
MDDFYCPVCQEVLKTPVRTTACQHVFCRKCFLTAMRESGAHCPLCRGNVTRRERACPERALDLENIMRKFSGSCRCCAKQIKFYRMRHHYKSCKKYQDEYGGSGSGSGSGSGSDDLGANDELISFKDEGEQEEKSSENSSAERDLADVKSSLVNESETGSGSGSPAAKRVKLDYPYDVPDYA

SEQ ID NO: 852 - protein, 163 aa, synthetic construct
  source 1..163: note = NLS-TCF4-(GS)1-RNF166 peptide
PAAKRVKLDGSGSGSDDLGANDELISFKDEGEQEEKSSENSSAERDLADVKSSLVNESETGSGLEAQYTCPICLEVYHRPVAIGSCGHTFCGECLQPCLQVPSPLCPLCRLPFDPKKVDKATHVEKQLSSYKAPCRGCNKKVTLAKMRVHISSCLKVQEQMAN

SEQ ID NO: 853 - protein, 165 aa, synthetic construct
  source 1..165: note = NLS-TCF4-(GS)2-RNF166 peptide
PAAKRVKLDGSGSGSDDLGANDELISFKDEGEQEEKSSENSSAERDLADVKSSLVNESETGSGSGLEAQYTCPICLEVYHRPVAIGSCGHTFCGECLQPCLQVPSPLCPLCRLPFDPKKVDKATHVEKQLSSYKAPCRGCNKKVTLAKMRVHISSCLKVQEQMAN

SEQ ID NO: 854 - protein, 167 aa, synthetic construct
  source 1..167: note = NLS-TCF4-(GS)3-RNF166 peptide
PAAKRVKLDGSGSGSDDLGANDELISFKDEGEQEEKSSENSSAERDLADVKSSLVNESETGSGSGSGLEAQYTCPICLEVYHRPVAIGSCGHTFCGECLQPCLQVPSPLCPLCRLPFDPKKVDKATHVEKQLSSYKAPCRGCNKKVTLAKMRVHISSCLKVQEQMAN

SEQ ID NO: 855 - protein, 169 aa, synthetic construct
  source 1..169: note = NLS-TCF4-(GS)4-RNF166 peptide
PAAKRVKLDGSGSGSDDLGANDELISFKDEGEQEEKSSENSSAERDLADVKSSLVNESETGSGSGSGSGLEAQYTCPICLEVYHRPVAIGSCGHTFCGECLQPCLQVPSPLCPLCRLPFDPKKVDKATHVEKQLSSYKAPCRGCNKKVTLAKMRVHISSCLKVQEQMAN

SEQ ID NO: 856 - protein, 171 aa, synthetic construct
  source 1..171: note = NLS-TCF4-(GS)5-RNF166 peptide
PAAKRVKLDGSGSGSDDLGANDELISFKDEGEQEEKSSENSSAERDLADVKSSLVNESETGSGSGSGSGSGLEAQYTCPICLEVYHRPVAIGSCGHTFCGECLQPCLQVPSPLCPLCRLPFDPKKVDKATHVEKQLSSYKAPCRGCNKKVTLAKMRVHISSCLKVQEQMAN

SEQ ID NO: 857 - protein, 173 aa, synthetic construct
  source 1..173: note = NLS-TCF4-(GS)6-RNF166 peptide
PAAKRVKLDGSGSGSDDLGANDELISFKDEGEQEEKSSENSSAERDLADVKSSLVNESETGSGSGSGSGSGSGLEAQYTCPICLEVYHRPVAIGSCGHTFCGECLQPCLQVPSPLCPLCRLPFDPKKVDKATHVEKQLSSYKAPCRGCNKKVTLAKMRVHISSCLKVQEQMAN

SEQ ID NO: 858 - protein, 173 aa, synthetic construct
  source 1..173: note = HA-NLS-TCF4-(GS)1-RNF166 peptide
MYPYDVPDYAPAAKRVKLDGSGSGSDDLGANDELISFKDEGEQEEKSSENSSAERDLADVKSSLVNESETGSGLEAQYTCPICLEVYHRPVAIGSCGHTFCGECLQPCLQVPSPLCPLCRLPFDPKKVDKATHVEKQLSSYKAPCRGCNKKVTLAKMRVHISSCLKVQEQMAN

SEQ ID NO: 859 - protein, 175 aa, synthetic construct
  source 1..175: note = HA-NLS-TCF4-(GS)2-RNF166 peptide
MYPYDVPDYAPAAKRVKLDGSGSGSDDLGANDELISFKDEGEQEEKSSENSSAERDLADVKSSLVNESETGSGSGLEAQYTCPICLEVYHRPVAIGSCGHTFCGECLQPCLQVPSPLCPLCRLPFDPKKVDKATHVEKQLSSYKAPCRGCNKKVTLAKMRVHISSCLKVQEQMAN

SEQ ID NO: 860 - protein, 177 aa, synthetic construct
  source 1..177: note = HA-NLS-TCF4-(GS)3-RNF166 peptide
MYPYDVPDYAPAAKRVKLDGSGSGSDDLGANDELISFKDEGEQEEKSSENSSAERDLADVKSSLVNESETGSGSGSGLEAQYTCPICLEVYHRPVAIGSCGHTFCGECLQPCLQVPSPLCPLCRLPFDPKKVDKATHVEKQLSSYKAPCRGCNKKVTLAKMRVHISSCLKVQEQMAN

SEQ ID NO: 861 - protein, 179 aa, synthetic construct
  source 1..179: note = HA-NLS-TCF4-(GS)4-RNF166 peptide
MYPYDVPDYAPAAKRVKLDGSGSGSDDLGANDELISFKDEGEQEEKSSENSSAERDLADVKSSLVNESETGSGSGSGSGLEAQYTCPICLEVYHRPVAIGSCGHTFCGECLQPCLQVPSPLCPLCRLPFDPKKVDKATHVEKQLSSYKAPCRGCNKKVTLAKMRVHISSCLKVQEQMAN

SEQ ID NO: 862 - protein, 181 aa, synthetic construct
  source 1..181: note = HA-NLS-TCF4-(GS)5-RNF166 peptide
MYPYDVPDYAPAAKRVKLDGSGSGSDDLGANDELISFKDEGEQEEKSSENSSAERDLADVKSSLVNESETGSGSGSGSGSGLEAQYTCPICLEVYHRPVAIGSCGHTFCGECLQPCLQVPSPLCPLCRLPFDPKKVDKATHVEKQLSSYKAPCRGCNKKVTLAKMRVHISSCLKVQEQMAN

SEQ ID NO: 863 - protein, 183 aa, synthetic construct
  source 1..183: note = HA-NLS-TCF4-(GS)6-RNF166 peptide
MYPYDVPDYAPAAKRVKLDGSGSGSDDLGANDELISFKDEGEQEEKSSENSSAERDLADVKSSLVNESETGSGSGSGSGSGSGLEAQYTCPICLEVYHRPVAIGSCGHTFCGECLQPCLQVPSPLCPLCRLPFDPKKVDKATHVEKQLSSYKAPCRGCNKKVTLAKMRVHISSCLKVQEQMAN

SEQ ID NO: 864 - protein, 164 aa, synthetic construct
  source 1..164: note = RNF166-(GS)1-TCF4-NLS peptide
MGLEAQYTCPICLEVYHRPVAIGSCGHTFCGECLQPCLQVPSPLCPLCRLPFDPKKVDKATHVEKQLSSYKAPCRGCNKKVTLAKMRVHISSCLKVQEQMANGSDDLGANDELISFKDEGEQEEKSSENSSAERDLADVKSSLVNESETGSGSGSPAAKRVKLD

SEQ ID NO: 865 - protein, 166 aa, synthetic construct
  source 1..166: note = RNF166-(GS)2-TCF4-NLS peptide
MGLEAQYTCPICLEVYHRPVAIGSCGHTFCGECLQPCLQVPSPLCPLCRLPFDPKKVDKATHVEKQLSSYKAPCRGCNKKVTLAKMRVHISSCLKVQEQMANGSGSDDLGANDELISFKDEGEQEEKSSENSSAERDLADVKSSLVNESETGSGSGSPAAKRVKLD

SEQ ID NO: 866 - protein, 168 aa, synthetic construct
  source 1..168: note = RNF166-(GS)3-TCF4-NLS peptide
MGLEAQYTCPICLEVYHRPVAIGSCGHTFCGECLQPCLQVPSPLCPLCRLPFDPKKVDKATHVEKQLSSYKAPCRGCNKKVTLAKMRVHISSCLKVQEQMANGSGSGSDDLGANDELISFKDEGEQEEKSSENSSAERDLADVKSSLVNESETGSGSGSPAAKRVKLD

SEQ ID NO: 867 - protein, 170 aa, synthetic construct
  source 1..170: note = RNF166-(GS)4-TCF4-NLS peptide
MGLEAQYTCPICLEVYHRPVAIGSCGHTFCGECLQPCLQVPSPLCPLCRLPFDPKKVDKATHVEKQLSSYKAPCRGCNKKVTLAKMRVHISSCLKVQEQMANGSGSGSGSDDLGANDELISFKDEGEQEEKSSENSSAERDLADVKSSLVNESETGSGSGSPAAKRVKLD

SEQ ID NO: 868 - protein, 172 aa, synthetic construct
  source 1..172: note = RNF166-(GS)5-TCF4-NLS peptide
MGLEAQYTCPICLEVYHRPVAIGSCGHTFCGECLQPCLQVPSPLCPLCRLPFDPKKVDKATHVEKQLSSYKAPCRGCNKKVTLAKMRVHISSCLKVQEQMANGSGSGSGSGSDDLGANDELISFKDEGEQEEKSSENSSAERDLADVKSSLVNESETGSGSGSPAAKRVKLD

SEQ ID NO: 869 - protein, 174 aa, synthetic construct
  source 1..174: note = RNF166-(GS)6-TCF4-NLS peptide
MGLEAQYTCPICLEVYHRPVAIGSCGHTFCGECLQPCLQVPSPLCPLCRLPFDPKKVDKATHVEKQLSSYKAPCRGCNKKVTLAKMRVHISSCLKVQEQMANGSGSGSGSGSGSDDLGANDELISFKDEGEQEEKSSENSSAERDLADVKSSLVNESETGSGSGSPAAKRVKLD

SEQ ID NO: 870 - protein, 173 aa, synthetic construct
  source 1..173: note = RNF166-(GS)1-TCF4-NLS-HA peptide
MGLEAQYTCPICLEVYHRPVAIGSCGHTFCGECLQPCLQVPSPLCPLCRLPFDPKKVDKATHVEKQLSSYKAPCRGCNKKVTLAKMRVHISSCLKVQEQMANGSDDLGANDELISFKDEGEQEEKSSENSSAERDLADVKSSLVNESETGSGSGSPAAKRVKLDYPYDVPDYA

SEQ ID NO: 871 - protein, 175 aa, synthetic construct
  source 1..175: note = RNF166-(GS)2-TCF4-NLS-HA peptide
MGLEAQYTCPICLEVYHRPVAIGSCGHTFCGECLQPCLQVPSPLCPLCRLPFDPKKVDKATHVEKQLSSYKAPCRGCNKKVTLAKMRVHISSCLKVQEQMANGSGSDDLGANDELISFKDEGEQEEKSSENSSAERDLADVKSSLVNESETGSGSGSPAAKRVKLDYPYDVPDYA

SEQ ID NO: 872 - protein, 177 aa, synthetic construct
  source 1..177: note = RNF166-(GS)3-TCF4-NLS-HA peptide
MGLEAQYTCPICLEVYHRPVAIGSCGHTFCGECLQPCLQVPSPLCPLCRLPFDPKKVDKATHVEKQLSSYKAPCRGCNKKVTLAKMRVHISSCLKVQEQMANGSGSGSDDLGANDELISFKDEGEQEEKSSENSSAERDLADVKSSLVNESETGSGSGSPAAKRVKLDYPYDVPDYA

SEQ ID NO: 873 - protein, 179 aa, synthetic construct
  source 1..179: note = RNF166-(GS)4-TCF4-NLS-HA peptide
MGLEAQYTCPICLEVYHRPVAIGSCGHTFCGECLQPCLQVPSPLCPLCRLPFDPKKVDKATHVEKQLSSYKAPCRGCNKKVTLAKMRVHISSCLKVQEQMANGSGSGSGSDDLGANDELISFKDEGEQEEKSSENSSAERDLADVKSSLVNESETGSGSGSPAAKRVKLDYPYDVPDYA

SEQ ID NO: 874 - protein, 181 aa, synthetic construct
  source 1..181: note = RNF166-(GS)5-TCF4-NLS-HA peptide
MGLEAQYTCPICLEVYHRPVAIGSCGHTFCGECLQPCLQVPSPLCPLCRLPFDPKKVDKATHVEKQLSSYKAPCRGCNKKVTLAKMRVHISSCLKVQEQMANGSGSGSGSGSDDLGANDELISFKDEGEQEEKSSENSSAERDLADVKSSLVNESETGSGSGSPAAKRVKLDYPYDVPDYA

SEQ ID NO: 875 - protein, 183 aa, synthetic construct
  source 1..183: note = RNF166-(GS)6-TCF4-NLS-HA peptide
MGLEAQYTCPICLEVYHRPVAIGSCGHTFCGECLQPCLQVPSPLCPLCRLPFDPKKVDKATHVEKQLSSYKAPCRGCNKKVTLAKMRVHISSCLKVQEQMANGSGSGSGSGSGSDDLGANDELISFKDEGEQEEKSSENSSAERDLADVKSSLVNESETGSGSGSPAAKRVKLDYPYDVPDYA

SEQ ID NO: 876 - protein, 141 aa, synthetic construct
  source 1..141: note = NLS-TCF4-(GS)1-CBLb peptide
PAAKRVKLDGSGSGSDDLGANDELISFKDEGEQEEKSSENSSAERDLADVKSSLVNESETGSPHDHIKVTQEQYELECEMGSTFQLCKICAENDKDVKIEPCGHLMCTSCLTAWQESDGQGCPFCRCEIKGTEPIIVDPFD

SEQ ID NO: 877 - protein, 143 aa, synthetic construct
  source 1..143: note = NLS-TCF4-(GS)2-CBLb peptide
PAAKRVKLDGSGSGSDDLGANDELISFKDEGEQEEKSSENSSAERDLADVKSSLVNESETGSGSPHDHIKVTQEQYELECEMGSTFQLCKICAENDKDVKIEPCGHLMCTSCLTAWQESDGQGCPFCRCEIKGTEPIIVDPFD

SEQ ID NO: 878 - protein, 145 aa, synthetic construct
  source 1..145: note = NLS-TCF4-(GS)3-CBLb peptide
PAAKRVKLDGSGSGSDDLGANDELISFKDEGEQEEKSSENSSAERDLADVKSSLVNESETGSGSGSPHDHIKVTQEQYELECEMGSTFQLCKICAENDKDVKIEPCGHLMCTSCLTAWQESDGQGCPFCRCEIKGTEPIIVDPFD

SEQ ID NO: 879 - protein, 147 aa, synthetic construct
  source 1..147: note = NLS-TCF4-(GS)4-CBLb peptide
PAAKRVKLDGSGSGSDDLGANDELISFKDEGEQEEKSSENSSAERDLADVKSSLVNESETGSGSGSGSPHDHIKVTQEQYELECEMGSTFQLCKICAENDKDVKIEPCGHLMCTSCLTAWQESDGQGCPFCRCEIKGTEPIIVDPFD

SEQ ID NO: 880 - protein, 149 aa, synthetic construct
  source 1..149: note = NLS-TCF4-(GS)5-CBLb peptide
PAAKRVKLDGSGSGSDDLGANDELISFKDEGEQEEKSSENSSAERDLADVKSSLVNESETGSGSGSGSGSPHDHIKVTQEQYELECEMGSTFQLCKICAENDKDVKIEPCGHLMCTSCLTAWQESDGQGCPFCRCEIKGTEPIIVDPFD

SEQ ID NO: 881 - protein, 151 aa, synthetic construct
  source 1..151: note = NLS-TCF4-(GS)6-CBLb peptide
PAAKRVKLDGSGSGSDDLGANDELISFKDEGEQEEKSSENSSAERDLADVKSSLVNESETGSGSGSGSGSGSPHDHIKVTQEQYELECEMGSTFQLCKICAENDKDVKIEPCGHLMCTSCLTAWQESDGQGCPFCRCEIKGTEPIIVDPFD

SEQ ID NO: 882 - protein, 151 aa, synthetic construct
  source 1..151: note = HA-NLS-TCF4-(GS)1-CBLb peptide
MYPYDVPDYAPAAKRVKLDGSGSGSDDLGANDELISFKDEGEQEEKSSENSSAERDLADVKSSLVNESETGSPHDHIKVTQEQYELECEMGSTFQLCKICAENDKDVKIEPCGHLMCTSCLTAWQESDGQGCPFCRCEIKGTEPIIVDPFD

SEQ ID NO: 883 - protein, 153 aa, synthetic construct
  source 1..153: note = HA-NLS-TCF4-(GS)2-CBLb peptide
MYPYDVPDYAPAAKRVKLDGSGSGSDDLGANDELISFKDEGEQEEKSSENSSAERDLADVKSSLVNESETGSGSPHDHIKVTQEQYELECEMGSTFQLCKICAENDKDVKIEPCGHLMCTSCLTAWQESDGQGCPFCRCEIKGTEPIIVDPFD

SEQ ID NO: 884 - protein, 155 aa, synthetic construct
  source 1..155: note = HA-NLS-TCF4-(GS)3-CBLb peptide
MYPYDVPDYAPAAKRVKLDGSGSGSDDLGANDELISFKDEGEQEEKSSENSSAERDLADVKSSLVNESETGSGSGSPHDHIKVTQEQYELECEMGSTFQLCKICAENDKDVKIEPCGHLMCTSCLTAWQESDGQGCPFCRCEIKGTEPIIVDPFD

SEQ ID NO: 885 - protein, 157 aa, synthetic construct
  source 1..157: note = HA-NLS-TCF4-(GS)4-CBLb peptide
MYPYDVPDYAPAAKRVKLDGSGSGSDDLGANDELISFKDEGEQEEKSSENSSAERDLADVKSSLVNESETGSGSGSGSPHDHIKVTQEQYELECEMGSTFQLCKICAENDKDVKIEPCGHLMCTSCLTAWQESDGQGCPFCRCEIKGTEPIIVDPFD

SEQ ID NO: 886 - protein, 159 aa, synthetic construct
  source 1..159: note = HA-NLS-TCF4-(GS)5-CBLb peptide
MYPYDVPDYAPAAKRVKLDGSGSGSDDLGANDELISFKDEGEQEEKSSENSSAERDLADVKSSLVNESETGSGSGSGSGSPHDHIKVTQEQYELECEMGSTFQLCKICAENDKDVKIEPCGHLMCTSCLTAWQESDGQGCPFCRCEIKGTEPIIVDPFD

SEQ ID NO: 887 - protein, 161 aa, synthetic construct
  source 1..161: note = HA-NLS-TCF4-(GS)6-CBLb peptide
MYPYDVPDYAPAAKRVKLDGSGSGSDDLGANDELISFKDEGEQEEKSSENSSAERDLADVKSSLVNESETGSGSGSGSGSGSPHDHIKVTQEQYELECEMGSTFQLCKICAENDKDVKIEPCGHLMCTSCLTAWQESDGQGCPFCRCEIKGTEPIIVDPFD

SEQ ID NO: 888 - protein, 142 aa, synthetic construct
  source 1..142: note = CBLb-(GS)1-TCF4-NLS peptide
MPHDHIKVTQEQYELECEMGSTFQLCKICAENDKDVKIEPCGHLMCTSCLTAWQESDGQGCPFCRCEIKGTEPIIVDPFDGSDDLGANDELISFKDEGEQEEKSSENSSAERDLADVKSSLVNESETGSGSGSPAAKRVKLD

SEQ ID NO: 889 - protein, 144 aa, synthetic construct
  source 1..144: note = CBLb-(GS)2-TCF4-NLS peptide
MPHDHIKVTQEQYELECEMGSTFQLCKICAENDKDVKIEPCGHLMCTSCLTAWQESDGQGCPFCRCEIKGTEPIIVDPFDGSGSDDLGANDELISFKDEGEQEEKSSENSSAERDLADVKSSLVNESETGSGSGSPAAKRVKLD

SEQ ID NO: 890 - protein, 146 aa, synthetic construct
  source 1..146: note = CBLb-(GS)3-TCF4-NLS peptide
MPHDHIKVTQEQYELECEMGSTFQLCKICAENDKDVKIEPCGHLMCTSCLTAWQESDGQGCPFCRCEIKGTEPIIVDPFDGSGSGSDDLGANDELISFKDEGEQEEKSSENSSAERDLADVKSSLVNESETGSGSGSPAAKRVKLD

SEQ ID NO: 891 - protein, 148 aa, synthetic construct
  source 1..148: note = CBLb-(GS)4-TCF4-NLS peptide
MPHDHIKVTQEQYELECEMGSTFQLCKICAENDKDVKIEPCGHLMCTSCLTAWQESDGQGCPFCRCEIKGTEPIIVDPFDGSGSGSGSDDLGANDELISFKDEGEQEEKSSENSSAERDLADVKSSLVNESETGSGSGSPAAKRVKLD

SEQ ID NO: 892 - protein, 150 aa, synthetic construct
  source 1..150: note = CBLb-(GS)5-TCF4-NLS peptide
MPHDHIKVTQEQYELECEMGSTFQLCKICAENDKDVKIEPCGHLMCTSCLTAWQESDGQGCPFCRCEIKGTEPIIVDPFDGSGSGSGSGSDDLGANDELISFKDEGEQEEKSSENSSAERDLADVKSSLVNESETGSGSGSPAAKRVKLD

SEQ ID NO: 893 - protein, 152 aa, synthetic construct
  source 1..152: note = CBLb-(GS)6-TCF4-NLS peptide
MPHDHIKVTQEQYELECEMGSTFQLCKICAENDKDVKIEPCGHLMCTSCLTAWQESDGQGCPFCRCEIKGTEPIIVDPFDGSGSGSGSGSGSDDLGANDELISFKDEGEQEEKSSENSSAERDLADVKSSLVNESETGSGSGSPAAKRVKLD

SEQ ID NO: 894 - protein, 151 aa, synthetic construct
  source 1..151: note = CBLb-(GS)1-TCF4-NLS-HA peptide
MPHDHIKVTQEQYELECEMGSTFQLCKICAENDKDVKIEPCGHLMCTSCLTAWQESDGQGCPFCRCEIKGTEPIIVDPFDGSDDLGANDELISFKDEGEQEEKSSENSSAERDLADVKSSLVNESETGSGSGSPAAKRVKLDYPYDVPDYA

SEQ ID NO: 895 - protein, 153 aa, synthetic construct
  source 1..153: note = CBLb-(GS)2-TCF4-NLS-HA peptide
MPHDHIKVTQEQYELECEMGSTFQLCKICAENDKDVKIEPCGHLMCTSCLTAWQESDGQGCPFCRCEIKGTEPIIVDPFDGSGSDDLGANDELISFKDEGEQEEKSSENSSAERDLADVKSSLVNESETGSGSGSPAAKRVKLDYPYDVPDYA

SEQ ID NO: 896 - protein, 155 aa, synthetic construct
  source 1..155: note = CBLb-(GS)3-TCF4-NLS-HA peptide
MPHDHIKVTQEQYELECEMGSTFQLCKICAENDKDVKIEPCGHLMCTSCLTAWQESDGQGCPFCRCEIKGTEPIIVDPFDGSGSGSDDLGANDELISFKDEGEQEEKSSENSSAERDLADVKSSLVNESETGSGSGSPAAKRVKLDYPYDVPDYA

SEQ ID NO: 897 - protein, 157 aa, synthetic construct
  source 1..157: note = CBLb-(GS)4-TCF4-NLS-HA peptide
MPHDHIKVTQEQYELECEMGSTFQLCKICAENDKDVKIEPCGHLMCTSCLTAWQESDGQGCPFCRCEIKGTEPIIVDPFDGSGSGSGSDDLGANDELISFKDEGEQEEKSSENSSAERDLADVKSSLVNESETGSGSGSPAAKRVKLDYPYDVPDYA

SEQ ID NO: 898 - protein, 159 aa, synthetic construct
  source 1..159: note = CBLb-(GS)5-TCF4-NLS-HA peptide
MPHDHIKVTQEQYELECEMGSTFQLCKICAENDKDVKIEPCGHLMCTSCLTAWQESDGQGCPFCRCEIKGTEPIIVDPFDGSGSGSGSGSDDLGANDELISFKDEGEQEEKSSENSSAERDLADVKSSLVNESETGSGSGSPAAKRVKLDYPYDVPDYA

SEQ ID NO: 899 - protein, 161 aa, synthetic construct
  source 1..161: note = CBLb-(GS)6-TCF4-NLS-HA peptide
MPHDHIKVTQEQYELECEMGSTFQLCKICAENDKDVKIEPCGHLMCTSCLTAWQESDGQGCPFCRCEIKGTEPIIVDPFDGSGSGSGSGSGSDDLGANDELISFKDEGEQEEKSSENSSAERDLADVKSSLVNESETGSGSGSPAAKRVKLDYPYDVPDYA

SEQ ID NO: 900 - protein, 154 aa, synthetic construct
  source 1..154: note = NLS-TCF4-(GS)1-NHLRC1 peptide
PAAKRVKLDGSGSGSDDLGANDELISFKDEGEQEEKSSENSSAERDLADVKSSLVNESETGSESGPALHELMREAEISLLECKVCFEKFGHRQQRRPRNLSCGHVVCLACVAALAHPRTLALECPFCRRACRGCDTSDCLPVLHLIELLGSALR

SEQ ID NO: 901 - protein, 156 aa, synthetic construct
  source 1..156: note = NLS-TCF4-(GS)2-NHLRC1 peptide
PAAKRVKLDGSGSGSDDLGANDELISFKDEGEQEEKSSENSSAERDLADVKSSLVNESETGSGSESGPALHELMREAEISLLECKVCFEKFGHRQQRRPRNLSCGHVVCLACVAALAHPRTLALECPFCRRACRGCDTSDCLPVLHLIELLGSALR

SEQ ID NO: 902 - protein, 158 aa, synthetic construct
  source 1..158: note = NLS-TCF4-(GS)3-NHLRC1 peptide
PAAKRVKLDGSGSGSDDLGANDELISFKDEGEQEEKSSENSSAERDLADVKSSLVNESETGSGSGSESGPALHELMREAEISLLECKVCFEKFGHRQQRRPRNLSCGHVVCLACVAALAHPRTLALECPFCRRACRGCDTSDCLPVLHLIELLGSALR

SEQ ID NO: 903 - protein, 160 aa, synthetic construct
  source 1..160: note = NLS-TCF4-(GS)4-NHLRC1 peptide
PAAKRVKLDGSGSGSDDLGANDELISFKDEGEQEEKSSENSSAERDLADVKSSLVNESETGSGSGSGSESGPALHELMREAEISLLECKVCFEKFGHRQQRRPRNLSCGHVVCLACVAALAHPRTLALECPFCRRACRGCDTSDCLPVLHLIELLGSALR

SEQ ID NO: 904 - protein, 162 aa, synthetic construct
  source 1..162: note = NLS-TCF4-(GS)5-NHLRC1 peptide
PAAKRVKLDGSGSGSDDLGANDELISFKDEGEQEEKSSENSSAERDLADVKSSLVNESETGSGSGSGSGSESGPALHELMREAEISLLECKVCFEKFGHRQQRRPRNLSCGHVVCLACVAALAHPRTLALECPFCRRACRGCDTSDCLPVLHLIELLGSALR

SEQ ID NO: 905 - protein, 164 aa, synthetic construct
  source 1..164: note = NLS-TCF4-(GS)6-NHLRC1 peptide
PAAKRVKLDGSGSGSDDLGANDELISFKDEGEQEEKSSENSSAERDLADVKSSLVNESETGSGSGSGSGSGSESGPALHELMREAEISLLECKVCFEKFGHRQQRRPRNLSCGHVVCLACVAALAHPRTLALECPFCRRACRGCDTSDCLPVLHLIELLGSALR

SEQ ID NO: 906 - protein, 164 aa, synthetic construct
  source 1..164: note = HA-NLS-TCF4-(GS)1-NHLRC1 peptide
MYPYDVPDYAPAAKRVKLDGSGSGSDDLGANDELISFKDEGEQEEKSSENSSAERDLADVKSSLVNESETGSESGPALHELMREAEISLLECKVCFEKFGHRQQRRPRNLSCGHVVCLACVAALAHPRTLALECPFCRRACRGCDTSDCLPVLHLIELLGSALR

SEQ ID NO: 907 - protein, 166 aa, synthetic construct
  source 1..166: note = HA-NLS-TCF4-(GS)2-NHLRC1 peptide
MYPYDVPDYAPAAKRVKLDGSGSGSDDLGANDELISFKDEGEQEEKSSENSSAERDLADVKSSLVNESETGSGSESGPALHELMREAEISLLECKVCFEKFGHRQQRRPRNLSCGHVVCLACVAALAHPRTLALECPFCRRACRGCDTSDCLPVLHLIELLGSALR

SEQ ID NO: 908 - protein, 168 aa, synthetic construct
  source 1..168: note = HA-NLS-TCF4-(GS)3-NHLRC1 peptide
MYPYDVPDYAPAAKRVKLDGSGSGSDDLGANDELISFKDEGEQEEKSSENSSAERDLADVKSSLVNESETGSGSGSESGPALHELMREAEISLLECKVCFEKFGHRQQRRPRNLSCGHVVCLACVAALAHPRTLALECPFCRRACRGCDTSDCLPVLHLIELLGSALR

SEQ ID NO: 909 - protein, 170 aa, synthetic construct
  source 1..170: note = HA-NLS-TCF4-(GS)4-NHLRC1 peptide
MYPYDVPDYAPAAKRVKLDGSGSGSDDLGANDELISFKDEGEQEEKSSENSSAERDLADVKSSLVNESETGSGSGSGSESGPALHELMREAEISLLECKVCFEKFGHRQQRRPRNLSCGHVVCLACVAALAHPRTLALECPFCRRACRGCDTSDCLPVLHLIELLGSALR

SEQ ID NO: 910 - protein, 172 aa, synthetic construct
  source 1..172: note = HA-NLS-TCF4-(GS)5-NHLRC1 peptide
MYPYDVPDYAPAAKRVKLDGSGSGSDDLGANDELISFKDEGEQEEKSSENSSAERDLADVKSSLVNESETGSGSGSGSGSESGPALHELMREAEISLLECKVCFEKFGHRQQRRPRNLSCGHVVCLACVAALAHPRTLALECPFCRRACRGCDTSDCLPVLHLIELLGSALR

SEQ ID NO: 911 - protein, 174 aa, synthetic construct
  source 1..174: note = HA-NLS-TCF4-(GS)6-NHLRC1 peptide
MYPYDVPDYAPAAKRVKLDGSGSGSDDLGANDELISFKDEGEQEEKSSENSSAERDLADVKSSLVNESETGSGSGSGSGSGSESGPALHELMREAEISLLECKVCFEKFGHRQQRRPRNLSCGHVVCLACVAALAHPRTLALECPFCRRACRGCDTSDCLPVLHLIELLGSALR

SEQ ID NO: 912 - protein, 155 aa, synthetic construct
  source 1..155: note = NHLRC1-(GS)1-TCF4-NLS peptide
MESGPALHELMREAEISLLECKVCFEKFGHRQQRRPRNLSCGHVVCLACVAALAHPRTLALECPFCRRACRGCDTSDCLPVLHLIELLGSALRGSDDLGANDELISFKDEGEQEEKSSENSSAERDLADVKSSLVNESETGSGSGSPAAKRVKLD

SEQ ID NO: 913 - protein, 157 aa, synthetic construct
  source 1..157: note = NHLRC1-(GS)2-TCF4-NLS peptide
MESGPALHELMREAEISLLECKVCFEKFGHRQQRRPRNLSCGHVVCLACVAALAHPRTLALECPFCRRACRGCDTSDCLPVLHLIELLGSALRGSGSDDLGANDELISFKDEGEQEEKSSENSSAERDLADVKSSLVNESETGSGSGSPAAKRVKLD

SEQ ID NO: 914 - protein, 159 aa, synthetic construct
  source 1..159: note = NHLRC1-(GS)3-TCF4-NLS peptide
MESGPALHELMREAEISLLECKVCFEKFGHRQQRRPRNLSCGHVVCLACVAALAHPRTLALECPFCRRACRGCDTSDCLPVLHLIELLGSALRGSGSGSDDLGANDELISFKDEGEQEEKSSENSSAERDLADVKSSLVNESETGSGSGSPAAKRVKLD

SEQ ID NO: 915 - protein, 161 aa, synthetic construct
  source 1..161: note = NHLRC1-(GS)4-TCF4-NLS peptide
MESGPALHELMREAEISLLECKVCFEKFGHRQQRRPRNLSCGHVVCLACVAALAHPRTLALECPFCRRACRGCDTSDCLPVLHLIELLGSALRGSGSGSGSDDLGANDELISFKDEGEQEEKSSENSSAERDLADVKSSLVNESETGSGSGSPAAKRVKLD

SEQ ID NO: 916 - protein, 163 aa, synthetic construct
  source 1..163: note = NHLRC1-(GS)5-TCF4-NLS peptide
MESGPALHELMREAEISLLECKVCFEKFGHRQQRRPRNLSCGHVVCLACVAALAHPRTLALECPFCRRACRGCDTSDCLPVLHLIELLGSALRGSGSGSGSGSDDLGANDELISFKDEGEQEEKSSENSSAERDLADVKSSLVNESETGSGSGSPAAKRVKLD

SEQ ID NO: 917 - protein, 165 aa, synthetic construct
  source 1..165: note = NHLRC1-(GS)6-TCF4-NLS peptide
MESGPALHELMREAEISLLECKVCFEKFGHRQQRRPRNLSCGHVVCLACVAALAHPRTLALECPFCRRACRGCDTSDCLPVLHLIELLGSALRGSGSGSGSGSGSDDLGANDELISFKDEGEQEEKSSENSSAERDLADVKSSLVNESETGSGSGSPAAKRVKLD

SEQ ID NO: 918 - protein, 164 aa, synthetic construct
  source 1..164: note = NHLRC1-(GS)1-TCF4-NLS-HA peptide
MESGPALHELMREAEISLLECKVCFEKFGHRQQRRPRNLSCGHVVCLACVAALAHPRTLALECPFCRRACRGCDTSDCLPVLHLIELLGSALRGSDDLGANDELISFKDEGEQEEKSSENSSAERDLADVKSSLVNESETGSGSGSPAAKRVKLDYPYDVPDYA

SEQ ID NO: 919 - protein, 166 aa, synthetic construct
  source 1..166: note = NHLRC1-(GS)2-TCF4-NLS-HA peptide
MESGPALHELMREAEISLLECKVCFEKFGHRQQRRPRNLSCGHVVCLACVAALAHPRTLALECPFCRRACRGCDTSDCLPVLHLIELLGSALRGSGSDDLGANDELISFKDEGEQEEKSSENSSAERDLADVKSSLVNESETGSGSGSPAAKRVKLDYPYDVPDYA

SEQ ID NO: 920 - protein, 168 aa, synthetic construct
  source 1..168: note = NHLRC1-(GS)3-TCF4-NLS-HA peptide
MESGPALHELMREAEISLLECKVCFEKFGHRQQRRPRNLSCGHVVCLACVAALAHPRTLALECPFCRRACRGCDTSDCLPVLHLIELLGSALRGSGSGSDDLGANDELISFKDEGEQEEKSSENSSAERDLADVKSSLVNESETGSGSGSPAAKRVKLDYPYDVPDYA

SEQ ID NO: 921 - protein, 170 aa, synthetic construct
  source 1..170: note = NHLRC1-(GS)4-TCF4-NLS-HA peptide
MESGPALHELMREAEISLLECKVCFEKFGHRQQRRPRNLSCGHVVCLACVAALAHPRTLALECPFCRRACRGCDTSDCLPVLHLIELLGSALRGSGSGSGSDDLGANDELISFKDEGEQEEKSSENSSAERDLADVKSSLVNESETGSGSGSPAAKRVKLDYPYDVPDYA

SEQ ID NO: 922 - protein, 172 aa, synthetic construct
  source 1..172: note = NHLRC1-(GS)5-TCF4-NLS-HA peptide
MESGPALHELMREAEISLLECKVCFEKFGHRQQRRPRNLSCGHVVCLACVAALAHPRTLALECPFCRRACRGCDTSDCLPVLHLIELLGSALRGSGSGSGSGSDDLGANDELISFKDEGEQEEKSSENSSAERDLADVKSSLVNESETGSGSGSPAAKRVKLDYPYDVPDYA

SEQ ID NO: 923 - protein, 174 aa, synthetic construct
  source 1..174: note = NHLRC1-(GS)6-TCF4-NLS-HA peptide
MESGPALHELMREAEISLLECKVCFEKFGHRQQRRPRNLSCGHVVCLACVAALAHPRTLALECPFCRRACRGCDTSDCLPVLHLIELLGSALRGSGSGSGSGSGSDDLGANDELISFKDEGEQEEKSSENSSAERDLADVKSSLVNESETGSGSGSPAAKRVKLDYPYDVPDYA

SEQ ID NO: 924 - protein, 337 aa, synthetic construct
  source 1..337: note = TRIM21-TCF4-NLS peptide
MASAARLTMMWEEVTCPICLDPFVEPVSIECGHSFCQECISQVGKGGGSVCPVCRQRFLLKNLRPNRQLANMVNNLKEISQEAREGTQGERCAVHGERLHLFCEKDGKALCWVCAQSRKHRDHAMVPLEEAAQEYQEKLQVALGELRRKQELAEKLEVEIAIKRADWKKTVETQKSRIHAEFVQQKNFLVEEEQRQLQELEKDEREQLRILGEKEAKLAQQSQALQELISELDRRCHSSALELLQEVIIVLERSESWNLKDLDITSPELRSVCHVPGDDLGANDELISFKDEGEQEEKSSENSSAERDLADVKSSLVNESETGSGSGSPAAKRVKLD

SEQ ID NO: 925 - protein, 339 aa, synthetic construct
  source 1..339: note = TRIM21-(GS)1-TCF4-NLS peptide
MASAARLTMMWEEVTCPICLDPFVEPVSIECGHSFCQECISQVGKGGGSVCPVCRQRFLLKNLRPNRQLANMVNNLKEISQEAREGTQGERCAVHGERLHLFCEKDGKALCWVCAQSRKHRDHAMVPLEEAAQEYQEKLQVALGELRRKQELAEKLEVEIAIKRADWKKTVETQKSRIHAEFVQQKNFLVEEEQRQLQELEKDEREQLRILGEKEAKLAQQSQALQELISELDRRCHSSALELLQEVIIVLERSESWNLKDLDITSPELRSVCHVPGGSDDLGANDELISFKDEGEQEEKSSENSSAERDLADVKSSLVNESETGSGSGSPAAKRVKLD

SEQ ID NO: 926 - protein, 341 aa, synthetic construct
  source 1..341: note = TRIM21-(GS)2-TCF4-NLS peptide
MASAARLTMMWEEVTCPICLDPFVEPVSIECGHSFCQECISQVGKGGGSVCPVCRQRFLLKNLRPNRQLANMVNNLKEISQEAREGTQGERCAVHGERLHLFCEKDGKALCWVCAQSRKHRDHAMVPLEEAAQEYQEKLQVALGELRRKQELAEKLEVEIAIKRADWKKTVETQKSRIHAEFVQQKNFLVEEEQRQLQELEKDEREQLRILGEKEAKLAQQSQALQELISELDRRCHSSALELLQEVIIVLERSESWNLKDLDITSPELRSVCHVPGGSGSDDLGANDELISFKDEGEQEEKSSENSSAERDLADVKSSLVNESETGSGSGSPAAKRVKLD

SEQ ID NO: 927 - protein, 343 aa, synthetic construct
  source 1..343: note = TRIM21-(GS)3-TCF4-NLS peptide
MASAARLTMMWEEVTCPICLDPFVEPVSIECGHSFCQECISQVGKGGGSVCPVCRQRFLLKNLRPNRQLANMVNNLKEISQEAREGTQGERCAVHGERLHLFCEKDGKALCWVCAQSRKHRDHAMVPLEEAAQEYQEKLQVALGELRRKQELAEKLEVEIAIKRADWKKTVETQKSRIHAEFVQQKNFLVEEEQRQLQELEKDEREQLRILGEKEAKLAQQSQALQELISELDRRCHSSALELLQEVIIVLERSESWNLKDLDITSPELRSVCHVPGGSGSGSDDLGANDELISFKDEGEQEEKSSENSSAERDLADVKSSLVNESETGSGSGSPAAKRVKLD

SEQ ID NO: 928 - protein, 345 aa, synthetic construct
  source 1..345: note = TRIM21-(GS)4-TCF4-NLS peptide
MASAARLTMMWEEVTCPICLDPFVEPVSIECGHSFCQECISQVGKGGGSVCPVCRQRFLLKNLRPNRQLANMVNNLKEISQEAREGTQGERCAVHGERLHLFCEKDGKALCWVCAQSRKHRDHAMVPLEEAAQEYQEKLQVALGELRRKQELAEKLEVEIAIKRADWKKTVETQKSRIHAEFVQQKNFLVEEEQRQLQELEKDEREQLRILGEKEAKLAQQSQALQELISELDRRCHSSALELLQEVIIVLERSESWNLKDLDITSPELRSVCHVPGGSGSGSGSDDLGANDELISFKDEGEQEEKSSENSSAERDLADVKSSLVNESETGSGSGSPAAKRVKLD

SEQ ID NO: 929 - protein, 347 aa, synthetic construct
  source 1..347: note = TRIM21-(GS)5-TCF4-NLS peptide
MASAARLTMMWEEVTCPICLDPFVEPVSIECGHSFCQECISQVGKGGGSVCPVCRQRFLLKNLRPNRQLANMVNNLKEISQEAREGTQGERCAVHGERLHLFCEKDGKALCWVCAQSRKHRDHAMVPLEEAAQEYQEKLQVALGELRRKQELAEKLEVEIAIKRADWKKTVETQKSRIHAEFVQQKNFLVEEEQRQLQELEKDEREQLRILGEKEAKLAQQSQALQELISELDRRCHSSALELLQEVIIVLERSESWNLKDLDITSPELRSVCHVPGGSGSGSGSGSDDLGANDELISFKDEGEQEEKSSENSSAERDLADVKSSLVNESETGSGSGSPAAKRVKLD

SEQ ID NO: 930 - protein, 349 aa, synthetic construct
  source 1..349: note = TRIM21-(GS)6-TCF4-NLS peptide
MASAARLTMMWEEVTCPICLDPFVEPVSIECGHSFCQECISQVGKGGGSVCPVCRQRFLLKNLRPNRQLANMVNNLKEISQEAREGTQGERCAVHGERLHLFCEKDGKALCWVCAQSRKHRDHAMVPLEEAAQEYQEKLQVALGELRRKQELAEKLEVEIAIKRADWKKTVETQKSRIHAEFVQQKNFLVEEEQRQLQELEKDEREQLRILGEKEAKLAQQSQALQELISELDRRCHSSALELLQEVIIVLERSESWNLKDLDITSPELRSVCHVPGGSGSGSGSGSGSDDLGANDELISFKDEGEQEEKSSENSSAERDLADVKSSLVNESETGSGSGSPAAKRVKLD

SEQ ID NO: 931 - protein, 346 aa, synthetic construct
  source 1..346: note = TRIM21-TCF4-NLS-HA peptide
MASAARLTMMWEEVTCPICLDPFVEPVSIECGHSFCQECISQVGKGGGSVCPVCRQRFLLKNLRPNRQLANMVNNLKEISQEAREGTQGERCAVHGERLHLFCEKDGKALCWVCAQSRKHRDHAMVPLEEAAQEYQEKLQVALGELRRKQELAEKLEVEIAIKRADWKKTVETQKSRIHAEFVQQKNFLVEEEQRQLQELEKDEREQLRILGEKEAKLAQQSQALQELISELDRRCHSSALELLQEVIIVLERSESWNLKDLDITSPELRSVCHVPGDDLGANDELISFKDEGEQEEKSSENSSAERDLADVKSSLVNESETGSGSGSPAAKRVKLDYPYDVPDYA

SEQ ID NO: 932 - protein, 348 aa, synthetic construct
  source 1..348: note = TRIM21-(GS)1-TCF4-NLS-HA peptide
MASAARLTMMWEEVTCPICLDPFVEPVSIECGHSFCQECISQVGKGGGSVCPVCRQRFLLKNLRPNRQLANMVNNLKEISQEAREGTQGERCAVHGERLHLFCEKDGKALCWVCAQSRKHRDHAMVPLEEAAQEYQEKLQVALGELRRKQELAEKLEVEIAIKRADWKKTVETQKSRIHAEFVQQKNFLVEEEQRQLQELEKDEREQLRILGEKEAKLAQQSQALQELISELDRRCHSSALELLQEVIIVLERSESWNLKDLDITSPELRSVCHVPGGSDDLGANDELISFKDEGEQEEKSSENSSAERDLADVKSSLVNESETGSGSGSPAAKRVKLDYPYDVPDYA

SEQ ID NO: 933 - protein, 350 aa, synthetic construct
  source 1..350: note = TRIM21-(GS)2-TCF4-NLS-HA peptide
MASAARLTMMWEEVTCPICLDPFVEPVSIECGHSFCQECISQVGKGGGSVCPVCRQRFLLKNLRPNRQLANMVNNLKEISQEAREGTQGERCAVHGERLHLFCEKDGKALCWVCAQSRKHRDHAMVPLEEAAQEYQEKLQVALGELRRKQELAEKLEVEIAIKRADWKKTVETQKSRIHAEFVQQKNFLVEEEQRQLQELEKDEREQLRILGEKEAKLAQQSQALQELISELDRRCHSSALELLQEVIIVLERSESWNLKDLDITSPELRSVCHVPGGSGSDDLGANDELISFKDEGEQEEKSSENSSAERDLADVKSSLVNESETGSGSGSPAAKRVKLDYPYDVPDYA

SEQ ID NO: 934 - protein, 352 aa, synthetic construct
  source 1..352: note = TRIM21-(GS)3-TCF4-NLS-HA peptide
MASAARLTMMWEEVTCPICLDPFVEPVSIECGHSFCQECISQVGKGGGSVCPVCRQRFLLKNLRPNRQLANMVNNLKEISQEAREGTQGERCAVHGERLHLFCEKDGKALCWVCAQSRKHRDHAMVPLEEAAQEYQEKLQVALGELRRKQELAEKLEVEIAIKRADWKKTVETQKSRIHAEFVQQKNFLVEEEQRQLQELEKDEREQLRILGEKEAKLAQQSQALQELISELDRRCHSSALELLQEVIIVLERSESWNLKDLDITSPELRSVCHVPGGSGSGSDDLGANDELISFKDEGEQEEKSSENSSAERDLADVKSSLVNESETGSGSGSPAAKRVKLDYPYDVPDYA

SEQ ID NO: 935 - protein, 354 aa, synthetic construct
  source 1..354: note = TRIM21-(GS)4-TCF4-NLS-HA peptide
MASAARLTMMWEEVTCPICLDPFVEPVSIECGHSFCQECISQVGKGGGSVCPVCRQRFLLKNLRPNRQLANMVNNLKEISQEAREGTQGERCAVHGERLHLFCEKDGKALCWVCAQSRKHRDHAMVPLEEAAQEYQEKLQVALGELRRKQELAEKLEVEIAIKRADWKKTVETQKSRIHAEFVQQKNFLVEEEQRQLQELEKDEREQLRILGEKEAKLAQQSQALQELISELDRRCHSSALELLQEVIIVLERSESWNLKDLDITSPELRSVCHVPGGSGSGSGSDDLGANDELISFKDEGEQEEKSSENSSAERDLADVKSSLVNESETGSGSGSPAAKRVKLDYPYDVPDYA

SEQ ID NO: 936 - protein, 356 aa, synthetic construct
  source 1..356: note = TRIM21-(GS)5-TCF4-NLS-HA peptide
MASAARLTMMWEEVTCPICLDPFVEPVSIECGHSFCQECISQVGKGGGSVCPVCRQRFLLKNLRPNRQLANMVNNLKEISQEAREGTQGERCAVHGERLHLFCEKDGKALCWVCAQSRKHRDHAMVPLEEAAQEYQEKLQVALGELRRKQELAEKLEVEIAIKRADWKKTVETQKSRIHAEFVQQKNFLVEEEQRQLQELEKDEREQLRILGEKEAKLAQQSQALQELISELDRRCHSSALELLQEVIIVLERSESWNLKDLDITSPELRSVCHVPGGSGSGSGSGSDDLGANDELISFKDEGEQEEKSSENSSAERDLADVKSSLVNESETGSGSGSPAAKRVKLDYPYDVPDYA

SEQ ID NO: 937 - protein, 358 aa, synthetic construct
  source 1..358: note = TRIM21-(GS)6-TCF4-NLS-HA peptide
MASAARLTMMWEEVTCPICLDPFVEPVSIECGHSFCQECISQVGKGGGSVCPVCRQRFLLKNLRPNRQLANMVNNLKEISQEAREGTQGERCAVHGERLHLFCEKDGKALCWVCAQSRKHRDHAMVPLEEAAQEYQEKLQVALGELRRKQELAEKLEVEIAIKRADWKKTVETQKSRIHAEFVQQKNFLVEEEQRQLQELEKDEREQLRILGEKEAKLAQQSQALQELISELDRRCHSSALELLQEVIIVLERSESWNLKDLDITSPELRSVCHVPGGSGSGSGSGSGSDDLGANDELISFKDEGEQEEKSSENSSAERDLADVKSSLVNESETGSGSGSPAAKRVKLDYPYDVPDYA

SEQ ID NO: 938 - protein, 228 aa, synthetic construct
  source 1..228: note = TCF4-(GS)1-CHIP peptide
MDDLGANDELISFKDEGEQEEKSSENSSAERDLADVKSSLVNESETGSRLNFGDDIPSALRIAKKKRWNSIEERRIHQESELHSYLSRLIAAERERELEECQRNHEGDEDDSHVRAQQACIEAKHDKYMADMDELFSQVDEKRKKRDIPDYLCGKISFELMREPCITPSGITYDRKDIEEHLQRVGHFDPVTRSPLTQEQLIPNLAMKEVIDAFISENGWVEDYGSGS

SEQ ID NO: 939 - protein, 230 aa, synthetic construct
  source 1..230: note = TCF4-(GS)2-CHIP peptide
MDDLGANDELISFKDEGEQEEKSSENSSAERDLADVKSSLVNESETGSGSRLNFGDDIPSALRIAKKKRWNSIEERRIHQESELHSYLSRLIAAERERELEECQRNHEGDEDDSHVRAQQACIEAKHDKYMADMDELFSQVDEKRKKRDIPDYLCGKISFELMREPCITPSGITYDRKDIEEHLQRVGHFDPVTRSPLTQEQLIPNLAMKEVIDAFISENGWVEDYGSGS

SEQ ID NO: 940 - protein, 232 aa, synthetic construct
  source 1..232: note = TCF4-(GS)3-CHIP peptide
MDDLGANDELISFKDEGEQEEKSSENSSAERDLADVKSSLVNESETGSGSGSRLNFGDDIPSALRIAKKKRWNSIEERRIHQESELHSYLSRLIAAERERELEECQRNHEGDEDDSHVRAQQACIEAKHDKYMADMDELFSQVDEKRKKRDIPDYLCGKISFELMREPCITPSGITYDRKDIEEHLQRVGHFDPVTRSPLTQEQLIPNLAMKEVIDAFISENGWVEDYGSGS

SEQ ID NO: 941 - protein, 234 aa, synthetic construct
  source 1..234: note = TCF4-(GS)4-CHIP peptide
MDDLGANDELISFKDEGEQEEKSSENSSAERDLADVKSSLVNESETGSGSGSGSRLNFGDDIPSALRIAKKKRWNSIEERRIHQESELHSYLSRLIAAERERELEECQRNHEGDEDDSHVRAQQACIEAKHDKYMADMDELFSQVDEKRKKRDIPDYLCGKISFELMREPCITPSGITYDRKDIEEHLQRVGHFDPVTRSPLTQEQLIPNLAMKEVIDAFISENGWVEDYGSGS

SEQ ID NO: 942 - protein, 236 aa, synthetic construct
  source 1..236: note = TCF4-(GS)5-CHIP peptide
MDDLGANDELISFKDEGEQEEKSSENSSAERDLADVKSSLVNESETGSGSGSGSGSRLNFGDDIPSALRIAKKKRWNSIEERRIHQESELHSYLSRLIAAERERELEECQRNHEGDEDDSHVRAQQACIEAKHDKYMADMDELFSQVDEKRKKRDIPDYLCGKISFELMREPCITPSGITYDRKDIEEHLQRVGHFDPVTRSPLTQEQLIPNLAMKEVIDAFISENGWVEDYGSGS

SEQ ID NO: 943 - protein, 238 aa, synthetic construct
  source 1..238: note = TCF4-(GS)6-CHIP peptide
MDDLGANDELISFKDEGEQEEKSSENSSAERDLADVKSSLVNESETGSGSGSGSGSGSRLNFGDDIPSALRIAKKKRWNSIEERRIHQESELHSYLSRLIAAERERELEECQRNHEGDEDDSHVRAQQACIEAKHDKYMADMDELFSQVDEKRKKRDIPDYLCGKISFELMREPCITPSGITYDRKDIEEHLQRVGHFDPVTRSPLTQEQLIPNLAMKEVIDAFISENGWVEDYGSGS

SEQ ID NO: 944 - protein, 237 aa, synthetic construct
  source 1..237: note = TCF4-(GS)1-CHIP-HA peptide
MDDLGANDELISFKDEGEQEEKSSENSSAERDLADVKSSLVNESETGSRLNFGDDIPSALRIAKKKRWNSIEERRIHQESELHSYLSRLIAAERERELEECQRNHEGDEDDSHVRAQQACIEAKHDKYMADMDELFSQVDEKRKKRDIPDYLCGKISFELMREPCITPSGITYDRKDIEEHLQRVGHFDPVTRSPLTQEQLIPNLAMKEVIDAFISENGWVEDYGSGSYPYDVPDYA

SEQ ID NO: 945 - protein, 239 aa, synthetic construct
  source 1..239: note = TCF4-(GS)2-CHIP-HA peptide
MDDLGANDELISFKDEGEQEEKSSENSSAERDLADVKSSLVNESETGSGSRLNFGDDIPSALRIAKKKRWNSIEERRIHQESELHSYLSRLIAAERERELEECQRNHEGDEDDSHVRAQQACIEAKHDKYMADMDELFSQVDEKRKKRDIPDYLCGKISFELMREPCITPSGITYDRKDIEEHLQRVGHFDPVTRSPLTQEQLIPNLAMKEVIDAFISENGWVEDYGSGSYPYDVPDYA

SEQ ID NO: 946 - protein, 241 aa, synthetic construct
  source 1..241: note = TCF4-(GS)3-CHIP-HA peptide
MDDLGANDELISFKDEGEQEEKSSENSSAERDLADVKSSLVNESETGSGSGSRLNFGDDIPSALRIAKKKRWNSIEERRIHQESELHSYLSRLIAAERERELEECQRNHEGDEDDSHVRAQQACIEAKHDKYMADMDELFSQVDEKRKKRDIPDYLCGKISFELMREPCITPSGITYDRKDIEEHLQRVGHFDPVTRSPLTQEQLIPNLAMKEVIDAFISENGWVEDYGSGSYPYDVPDYA

SEQ ID NO: 947 - protein, 243 aa, synthetic construct
  source 1..243: note = TCF4-(GS)4-CHIP-HA peptide
MDDLGANDELISFKDEGEQEEKSSENSSAERDLADVKSSLVNESETGSGSGSGSRLNFGDDIPSALRIAKKKRWNSIEERRIHQESELHSYLSRLIAAERERELEECQRNHEGDEDDSHVRAQQACIEAKHDKYMADMDELFSQVDEKRKKRDIPDYLCGKISFELMREPCITPSGITYDRKDIEEHLQRVGHFDPVTRSPLTQEQLIPNLAMKEVIDAFISENGWVEDYGSGSYPYDVPDYA

SEQ ID NO: 948 - protein, 245 aa, synthetic construct
  source 1..245: note = TCF4-(GS)5-CHIP-HA peptide
MDDLGANDELISFKDEGEQEEKSSENSSAERDLADVKSSLVNESETGSGSGSGSGSRLNFGDDIPSALRIAKKKRWNSIEERRIHQESELHSYLSRLIAAERERELEECQRNHEGDEDDSHVRAQQACIEAKHDKYMADMDELFSQVDEKRKKRDIPDYLCGKISFELMREPCITPSGITYDRKDIEEHLQRVGHFDPVTRSPLTQEQLIPNLAMKEVIDAFISENGWVEDYGSGSYPYDVPDYA

SEQ ID NO: 949 - protein, 247 aa, synthetic construct
  source 1..247: note = TCF4-(GS)6-CHIP-HA peptide
MDDLGANDELISFKDEGEQEEKSSENSSAERDLADVKSSLVNESETGSGSGSGSGSGSRLNFGDDIPSALRIAKKKRWNSIEERRIHQESELHSYLSRLIAAERERELEECQRNHEGDEDDSHVRAQQACIEAKHDKYMADMDELFSQVDEKRKKRDIPDYLCGKISFELMREPCITPSGITYDRKDIEEHLQRVGHFDPVTRSPLTQEQLIPNLAMKEVIDAFISENGWVEDYGSGSYPYDVPDYA

SEQ ID NO: 950 - protein, 82 aa, synthetic construct
  source 1..82: note = DCAF1-(GS)1-TCF4 peptide
QAPINFTSRLNRRASFPKYGGVDGGCFDRHLIFSRGSDDLGANDELISFKDEGEQEEKSSENSSAERDLADVKSSLVNESET

SEQ ID NO: 951 - protein, 84 aa, synthetic construct
  source 1..84: note = DCAF1-(GS)2-TCF4 peptide
QAPINFTSRLNRRASFPKYGGVDGGCFDRHLIFSRGSGSDDLGANDELISFKDEGEQEEKSSENSSAERDLADVKSSLVNESET

SEQ ID NO: 952 - protein, 86 aa, synthetic construct
  source 1..86: note = DCAF1-(GS)3-TCF4 peptide
QAPINFTSRLNRRASFPKYGGVDGGCFDRHLIFSRGSGSGSDDLGANDELISFKDEGEQEEKSSENSSAERDLADVKSSLVNESET

SEQ ID NO: 953 - protein, 88 aa, synthetic construct
  source 1..88: note = DCAF1-(GS)4-TCF4 peptide
QAPINFTSRLNRRASFPKYGGVDGGCFDRHLIFSRGSGSGSGSDDLGANDELISFKDEGEQEEKSSENSSAERDLADVKSSLVNESET

SEQ ID NO: 954 - protein, 90 aa, synthetic construct
  source 1..90: note = DCAF1-(GS)5-TCF4 peptide
QAPINFTSRLNRRASFPKYGGVDGGCFDRHLIFSRGSGSGSGSGSDDLGANDELISFKDEGEQEEKSSENSSAERDLADVKSSLVNESET

SEQ ID NO: 955 - protein, 92 aa, synthetic construct
  source 1..92: note = DCAF1-(GS)6-TCF4 peptide
QAPINFTSRLNRRASFPKYGGVDGGCFDRHLIFSRGSGSGSGSGSGSDDLGANDELISFKDEGEQEEKSSENSSAERDLADVKSSLVNESET

SEQ ID NO: 956 - protein, 98 aa, synthetic construct
  source 1..98: note = HA-DCAF1-(GS)1-TCF4 peptide
MYPYDVPDYAGSGSGSQAPINFTSRLNRRASFPKYGGVDGGCFDRHLIFSRGSDDLGANDELISFKDEGEQEEKSSENSSAERDLADVKSSLVNESET

SEQ ID NO: 957 - protein, 100 aa, synthetic construct
  source 1..100: note = HA-DCAF1-(GS)2-TCF4 peptide
MYPYDVPDYAGSGSGSQAPINFTSRLNRRASFPKYGGVDGGCFDRHLIFSRGSGSDDLGANDELISFKDEGEQEEKSSENSSAERDLADVKSSLVNESET

SEQ ID NO: 958 - protein, 102 aa, synthetic construct
  source 1..102: note = HA-DCAF1-(GS)3-TCF4 peptide
MYPYDVPDYAGSGSGSQAPINFTSRLNRRASFPKYGGVDGGCFDRHLIFSRGSGSGSDDLGANDELISFKDEGEQEEKSSENSSAERDLADVKSSLVNESET

SEQ ID NO: 959 - protein, 104 aa, synthetic construct
  source 1..104: note = HA-DCAF1-(GS)4-TCF4 peptide
MYPYDVPDYAGSGSGSQAPINFTSRLNRRASFPKYGGVDGGCFDRHLIFSRGSGSGSGSDDLGANDELISFKDEGEQEEKSSENSSAERDLADVKSSLVNESET

SEQ ID NO: 960 - protein, 106 aa, synthetic construct
  source 1..106: note = HA-DCAF1-(GS)5-TCF4 peptide
MYPYDVPDYAGSGSGSQAPINFTSRLNRRASFPKYGGVDGGCFDRHLIFSRGSGSGSGSGSDDLGANDELISFKDEGEQEEKSSENSSAERDLADVKSSLVNESET

SEQ ID NO: 961 - protein, 108 aa, synthetic construct
  source 1..108: note = HA-DCAF1-(GS)6-TCF4 peptide
MYPYDVPDYAGSGSGSQAPINFTSRLNRRASFPKYGGVDGGCFDRHLIFSRGSGSGSGSGSGSDDLGANDELISFKDEGEQEEKSSENSSAERDLADVKSSLVNESET

SEQ ID NO: 962 - protein, 403 aa, synthetic construct
  source 1..403: note = TCF4-(GS)1-E6AP peptide
DDLGANDELISFKDEGEQEEKSSENSSAERDLADVKSSLVNESETGSNPYLRLKVRRDHIIDDALVRLEMIAMENPADLKKQLYVEFEGEQGVDEGGVSKEFFQLVVEEIFNPDIGMFTYDESTKLFWFNPSSFETEGQFTLIGIVLGLAIYNNCILDVHFPMVVYRKLMGKKGTFRDLGDSHPVLYQSLKDLLEYEGNVEDDMMITFQISQTDLFGNPMMYDLKENGDKIPITNENRKEFVNLYSDYILNKSVEKQFKAFRRGFHMVTNESPLKYLFRPEEIELLICGSRNLDFQALEETTEYDGGYTRDSVLIREFWEIVHSFTDEQKRLFLQFTTGTDRAPVGGLGKLKMIIAKNGPDTERLPTSHTCFNVLLLPEYSSKEKLKERLLKAITYAKGFGML

SEQ ID NO: 963 - protein, 405 aa, synthetic construct
  source 1..405: note = TCF4-(GS)2-E6AP peptide
DDLGANDELISFKDEGEQEEKSSENSSAERDLADVKSSLVNESETGSGSNPYLRLKVRRDHIIDDALVRLEMIAMENPADLKKQLYVEFEGEQGVDEGGVSKEFFQLVVEEIFNPDIGMFTYDESTKLFWFNPSSFETEGQFTLIGIVLGLAIYNNCILDVHFPMVVYRKLMGKKGTFRDLGDSHPVLYQSLKDLLEYEGNVEDDMMITFQISQTDLFGNPMMYDLKENGDKIPITNENRKEFVNLYSDYILNKSVEKQFKAFRRGFHMVTNESPLKYLFRPEEIELLICGSRNLDFQALEETTEYDGGYTRDSVLIREFWEIVHSFTDEQKRLFLQFTTGTDRAPVGGLGKLKMIIAKNGPDTERLPTSHTCFNVLLLPEYSSKEKLKERLLKAITYAKGFGML

SEQ ID NO: 964 - protein, 407 aa, synthetic construct
  source 1..407: note = TCF4-(GS)3-E6AP peptide
DDLGANDELISFKDEGEQEEKSSENSSAERDLADVKSSLVNESETGSGSGSNPYLRLKVRRDHIIDDALVRLEMIAMENPADLKKQLYVEFEGEQGVDEGGVSKEFFQLVVEEIFNPDIGMFTYDESTKLFWFNPSSFETEGQFTLIGIVLGLAIYNNCILDVHFPMVVYRKLMGKKGTFRDLGDSHPVLYQSLKDLLEYEGNVEDDMMITFQISQTDLFGNPMMYDLKENGDKIPITNENRKEFVNLYSDYILNKSVEKQFKAFRRGFHMVTNESPLKYLFRPEEIELLICGSRNLDFQALEETTEYDGGYTRDSVLIREFWEIVHSFTDEQKRLFLQFTTGTDRAPVGGLGKLKMIIAKNGPDTERLPTSHTCFNVLLLPEYSSKEKLKERLLKAITYAKGFGML

SEQ ID NO: 965 - protein, 409 aa, synthetic construct
  source 1..409: note = TCF4-(GS)4-E6AP peptide
DDLGANDELISFKDEGEQEEKSSENSSAERDLADVKSSLVNESETGSGSGSGSNPYLRLKVRRDHIIDDALVRLEMIAMENPADLKKQLYVEFEGEQGVDEGGVSKEFFQLVVEEIFNPDIGMFTYDESTKLFWFNPSSFETEGQFTLIGIVLGLAIYNNCILDVHFPMVVYRKLMGKKGTFRDLGDSHPVLYQSLKDLLEYEGNVEDDMMITFQISQTDLFGNPMMYDLKENGDKIPITNENRKEFVNLYSDYILNKSVEKQFKAFRRGFHMVTNESPLKYLFRPEEIELLICGSRNLDFQALEETTEYDGGYTRDSVLIREFWEIVHSFTDEQKRLFLQFTTGTDRAPVGGLGKLKMIIAKNGPDTERLPTSHTCFNVLLLPEYSSKEKLKERLLKAITYAKGFGML

SEQ ID NO: 966 - protein, 411 aa, synthetic construct
  source 1..411: note = TCF4-(GS)5-E6AP peptide
DDLGANDELISFKDEGEQEEKSSENSSAERDLADVKSSLVNESETGSGSGSGSGSNPYLRLKVRRDHIIDDALVRLEMIAMENPADLKKQLYVEFEGEQGVDEGGVSKEFFQLVVEEIFNPDIGMFTYDESTKLFWFNPSSFETEGQFTLIGIVLGLAIYNNCILDVHFPMVVYRKLMGKKGTFRDLGDSHPVLYQSLKDLLEYEGNVEDDMMITFQISQTDLFGNPMMYDLKENGDKIPITNENRKEFVNLYSDYILNKSVEKQFKAFRRGFHMVTNESPLKYLFRPEEIELLICGSRNLDFQALEETTEYDGGYTRDSVLIREFWEIVHSFTDEQKRLFLQFTTGTDRAPVGGLGKLKMIIAKNGPDTERLPTSHTCFNVLLLPEYSSKEKLKERLLKAITYAKGFGML

SEQ ID NO: 967 - protein, 413 aa, synthetic construct
  source 1..413: note = TCF4-(GS)6-E6AP peptide
DDLGANDELISFKDEGEQEEKSSENSSAERDLADVKSSLVNESETGSGSGSGSGSGSNPYLRLKVRRDHIIDDALVRLEMIAMENPADLKKQLYVEFEGEQGVDEGGVSKEFFQLVVEEIFNPDIGMFTYDESTKLFWFNPSSFETEGQFTLIGIVLGLAIYNNCILDVHFPMVVYRKLMGKKGTFRDLGDSHPVLYQSLKDLLEYEGNVEDDMMITFQISQTDLFGNPMMYDLKENGDKIPITNENRKEFVNLYSDYILNKSVEKQFKAFRRGFHMVTNESPLKYLFRPEEIELLICGSRNLDFQALEETTEYDGGYTRDSVLIREFWEIVHSFTDEQKRLFLQFTTGTDRAPVGGLGKLKMIIAKNGPDTERLPTSHTCFNVLLLPEYSSKEKLKERLLKAITYAKGFGML

SEQ ID NO: 968 - protein, 419 aa, synthetic construct
  source 1..419: note = HA-TCF4-(GS)1-E6AP peptide
MYPYDVPDYAGSGSGSDDLGANDELISFKDEGEQEEKSSENSSAERDLADVKSSLVNESETGSNPYLRLKVRRDHIIDDALVRLEMIAMENPADLKKQLYVEFEGEQGVDEGGVSKEFFQLVVEEIFNPDIGMFTYDESTKLFWFNPSSFETEGQFTLIGIVLGLAIYNNCILDVHFPMVVYRKLMGKKGTFRDLGDSHPVLYQSLKDLLEYEGNVEDDMMITFQISQTDLFGNPMMYDLKENGDKIPITNENRKEFVNLYSDYILNKSVEKQFKAFRRGFHMVTNESPLKYLFRPEEIELLICGSRNLDFQALEETTEYDGGYTRDSVLIREFWEIVHSFTDEQKRLFLQFTTGTDRAPVGGLGKLKMIIAKNGPDTERLPTSHTCFNVLLLPEYSSKEKLKERLLKAITYAKGFGML

SEQ ID NO: 969 - protein, 421 aa, synthetic construct
  source 1..421: note = HA-TCF4-(GS)2-E6AP peptide
MYPYDVPDYAGSGSGSDDLGANDELISFKDEGEQEEKSSENSSAERDLADVKSSLVNESETGSGSNPYLRLKVRRDHIIDDALVRLEMIAMENPADLKKQLYVEFEGEQGVDEGGVSKEFFQLVVEEIFNPDIGMFTYDESTKLFWFNPSSFETEGQFTLIGIVLGLAIYNNCILDVHFPMVVYRKLMGKKGTFRDLGDSHPVLYQSLKDLLEYEGNVEDDMMITFQISQTDLFGNPMMYDLKENGDKIPITNENRKEFVNLYSDYILNKSVEKQFKAFRRGFHMVTNESPLKYLFRPEEIELLICGSRNLDFQALEETTEYDGGYTRDSVLIREFWEIVHSFTDEQKRLFLQFTTGTDRAPVGGLGKLKMIIAKNGPDTERLPTSHTCFNVLLLPEYSSKEKLKERLLKAITYAKGFGML

SEQ ID NO: 970 - protein, 423 aa, synthetic construct
  source 1..423: note = HA-TCF4-(GS)3-E6AP peptide
MYPYDVPDYAGSGSGSDDLGANDELISFKDEGEQEEKSSENSSAERDLADVKSSLVNESETGSGSGSNPYLRLKVRRDHIIDDALVRLEMIAMENPADLKKQLYVEFEGEQGVDEGGVSKEFFQLVVEEIFNPDIGMFTYDESTKLFWFNPSSFETEGQFTLIGIVLGLAIYNNCILDVHFPMVVYRKLMGKKGTFRDLGDSHPVLYQSLKDLLEYEGNVEDDMMITFQISQTDLFGNPMMYDLKENGDKIPITNENRKEFVNLYSDYILNKSVEKQFKAFRRGFHMVTNESPLKYLFRPEEIELLICGSRNLDFQALEETTEYDGGYTRDSVLIREFWEIVHSFTDEQKRLFLQFTTGTDRAPVGGLGKLKMIIAKNGPDTERLPTSHTCFNVLLLPEYSSKEKLKERLLKAITYAKGFGML

SEQ ID NO: 971 - protein, 425 aa, synthetic construct
  source 1..425: note = HA-TCF4-(GS)4-E6AP peptide
MYPYDVPDYAGSGSGSDDLGANDELISFKDEGEQEEKSSENSSAERDLADVKSSLVNESETGSGSGSGSNPYLRLKVRRDHIIDDALVRLEMIAMENPADLKKQLYVEFEGEQGVDEGGVSKEFFQLVVEEIFNPDIGMFTYDESTKLFWFNPSSFETEGQFTLIGIVLGLAIYNNCILDVHFPMVVYRKLMGKKGTFRDLGDSHPVLYQSLKDLLEYEGNVEDDMMITFQISQTDLFGNPMMYDLKENGDKIPITNENRKEFVNLYSDYILNKSVEKQFKAFRRGFHMVTNESPLKYLFRPEEIELLICGSRNLDFQALEETTEYDGGYTRDSVLIREFWEIVHSFTDEQKRLFLQFTTGTDRAPVGGLGKLKMIIAKNGPDTERLPTSHTCFNVLLLPEYSSKEKLKERLLKAITYAKGFGML

SEQ ID NO: 972 - protein, 427 aa, synthetic construct
  source 1..427: note = HA-TCF4-(GS)5-E6AP peptide
MYPYDVPDYAGSGSGSDDLGANDELISFKDEGEQEEKSSENSSAERDLADVKSSLVNESETGSGSGSGSGSNPYLRLKVRRDHIIDDALVRLEMIAMENPADLKKQLYVEFEGEQGVDEGGVSKEFFQLVVEEIFNPDIGMFTYDESTKLFWFNPSSFETEGQFTLIGIVLGLAIYNNCILDVHFPMVVYRKLMGKKGTFRDLGDSHPVLYQSLKDLLEYEGNVEDDMMITFQISQTDLFGNPMMYDLKENGDKIPITNENRKEFVNLYSDYILNKSVEKQFKAFRRGFHMVTNESPLKYLFRPEEIELLICGSRNLDFQALEETTEYDGGYTRDSVLIREFWEIVHSFTDEQKRLFLQFTTGTDRAPVGGLGKLKMIIAKNGPDTERLPTSHTCFNVLLLPEYSSKEKLKERLLKAITYAKGFGML

SEQ ID NO: 973 - protein, 429 aa, synthetic construct
  source 1..429: note = HA-TCF4-(GS)6-E6AP peptide
MYPYDVPDYAGSGSGSDDLGANDELISFKDEGEQEEKSSENSSAERDLADVKSSLVNESETGSGSGSGSGSGSNPYLRLKVRRDHIIDDALVRLEMIAMENPADLKKQLYVEFEGEQGVDEGGVSKEFFQLVVEEIFNPDIGMFTYDESTKLFWFNPSSFETEGQFTLIGIVLGLAIYNNCILDVHFPMVVYRKLMGKKGTFRDLGDSHPVLYQSLKDLLEYEGNVEDDMMITFQISQTDLFGNPMMYDLKENGDKIPITNENRKEFVNLYSDYILNKSVEKQFKAFRRGFHMVTNESPLKYLFRPEEIELLICGSRNLDFQALEETTEYDGGYTRDSVLIREFWEIVHSFTDEQKRLFLQFTTGTDRAPVGGLGKLKMIIAKNGPDTERLPTSHTCFNVLLLPEYSSKEKLKERLLKAITYAKGFGML

SEQ ID NO: 974 - protein, 333 aa, synthetic construct
  source 1..333: note = bTRCP-(GS)1-TCF4 peptide
DPAEAVLQEKALKFMCSMPRSLWLGCSSLADSMPSLRCLYNPGTGALTAFQNSSEREDCNNGEPPRKIIPEKNSLRQTYNSCARLCLNQETVCLASTAMKTENCVAKTKLANGTSSMIVPKQRKLSASYEKEKELCVKYFEQWSESDQVEFVEHLISQMCHYQHGHINSYLKPMLQRDFITALPARGLDHIAENILSYLDAKSLCAAELVCKEWYRVTSDGMLWKKLIERMVRTDSLWRGLAERRGWGQYLFKNKPPDGNAPPNSFYRALYPKIIQDIETIESNSRGSDDLGANDELISFKDEGEQEEKSSENSSAERDLADVKSSLVNESET

SEQ ID NO: 975 - protein, 335 aa, synthetic construct
  source 1..335: note = bTRCP-(GS)2-TCF4 peptide
DPAEAVLQEKALKFMCSMPRSLWLGCSSLADSMPSLRCLYNPGTGALTAFQNSSEREDCNNGEPPRKIIPEKNSLRQTYNSCARLCLNQETVCLASTAMKTENCVAKTKLANGTSSMIVPKQRKLSASYEKEKELCVKYFEQWSESDQVEFVEHLISQMCHYQHGHINSYLKPMLQRDFITALPARGLDHIAENILSYLDAKSLCAAELVCKEWYRVTSDGMLWKKLIERMVRTDSLWRGLAERRGWGQYLFKNKPPDGNAPPNSFYRALYPKIIQDIETIESNSRGSGSDDLGANDELISFKDEGEQEEKSSENSSAERDLADVKSSLVNESET

SEQ ID NO: 976 - protein, 337 aa, synthetic construct
  source 1..337: note = bTRCP-(GS)3-TCF4 peptide
DPAEAVLQEKALKFMCSMPRSLWLGCSSLADSMPSLRCLYNPGTGALTAFQNSSEREDCNNGEPPRKIIPEKNSLRQTYNSCARLCLNQETVCLASTAMKTENCVAKTKLANGTSSMIVPKQRKLSASYEKEKELCVKYFEQWSESDQVEFVEHLISQMCHYQHGHINSYLKPMLQRDFITALPARGLDHIAENILSYLDAKSLCAAELVCKEWYRVTSDGMLWKKLIERMVRTDSLWRGLAERRGWGQYLFKNKPPDGNAPPNSFYRALYPKIIQDIETIESNSRGSGSGSDDLGANDELISFKDEGEQEEKSSENSSAERDLADVKSSLVNESET

SEQ ID NO: 977 - protein, 339 aa, synthetic construct
  source 1..339: note = bTRCP-(GS)4-TCF4 peptide
DPAEAVLQEKALKFMCSMPRSLWLGCSSLADSMPSLRCLYNPGTGALTAFQNSSEREDCNNGEPPRKIIPEKNSLRQTYNSCARLCLNQETVCLASTAMKTENCVAKTKLANGTSSMIVPKQRKLSASYEKEKELCVKYFEQWSESDQVEFVEHLISQMCHYQHGHINSYLKPMLQRDFITALPARGLDHIAENILSYLDAKSLCAAELVCKEWYRVTSDGMLWKKLIERMVRTDSLWRGLAERRGWGQYLFKNKPPDGNAPPNSFYRALYPKIIQDIETIESNSRGSGSGSGSDDLGANDELISFKDEGEQEEKSSENSSAERDLADVKSSLVNESET

SEQ ID NO: 978 - protein, 341 aa, synthetic construct
  source 1..341: note = bTRCP-(GS)5-TCF4 peptide
DPAEAVLQEKALKFMCSMPRSLWLGCSSLADSMPSLRCLYNPGTGALTAFQNSSEREDCNNGEPPRKIIPEKNSLRQTYNSCARLCLNQETVCLASTAMKTENCVAKTKLANGTSSMIVPKQRKLSASYEKEKELCVKYFEQWSESDQVEFVEHLISQMCHYQHGHINSYLKPMLQRDFITALPARGLDHIAENILSYLDAKSLCAAELVCKEWYRVTSDGMLWKKLIERMVRTDSLWRGLAERRGWGQYLFKNKPPDGNAPPNSFYRALYPKIIQDIETIESNSRGSGSGSGSGSDDLGANDELISFKDEGEQEEKSSENSSAERDLADVKSSLVNESET

SEQ ID NO: 979 - protein, 343 aa, synthetic construct
  source 1..343: note = bTRCP-(GS)6-TCF4 peptide
DPAEAVLQEKALKFMCSMPRSLWLGCSSLADSMPSLRCLYNPGTGALTAFQNSSEREDCNNGEPPRKIIPEKNSLRQTYNSCARLCLNQETVCLASTAMKTENCVAKTKLANGTSSMIVPKQRKLSASYEKEKELCVKYFEQWSESDQVEFVEHLISQMCHYQHGHINSYLKPMLQRDFITALPARGLDHIAENILSYLDAKSLCAAELVCKEWYRVTSDGMLWKKLIERMVRTDSLWRGLAERRGWGQYLFKNKPPDGNAPPNSFYRALYPKIIQDIETIESNSRGSGSGSGSGSGSDDLGANDELISFKDEGEQEEKSSENSSAERDLADVKSSLVNESET

SEQ ID NO: 980 - protein, 343 aa, synthetic construct
  source 1..343: note = HA-bTRCP-(GS)1-TCF4 peptide
MYPYDVPDYADPAEAVLQEKALKFMCSMPRSLWLGCSSLADSMPSLRCLYNPGTGALTAFQNSSEREDCNNGEPPRKIIPEKNSLRQTYNSCARLCLNQETVCLASTAMKTENCVAKTKLANGTSSMIVPKQRKLSASYEKEKELCVKYFEQWSESDQVEFVEHLISQMCHYQHGHINSYLKPMLQRDFITALPARGLDHIAENILSYLDAKSLCAAELVCKEWYRVTSDGMLWKKLIERMVRTDSLWRGLAERRGWGQYLFKNKPPDGNAPPNSFYRALYPKIIQDIETIESNSRGSDDLGANDELISFKDEGEQEEKSSENSSAERDLADVKSSLVNESET

SEQ ID NO: 981 - protein, 345 aa, synthetic construct
  source 1..345: note = HA-bTRCP-(GS)2-TCF4 peptide
MYPYDVPDYADPAEAVLQEKALKFMCSMPRSLWLGCSSLADSMPSLRCLYNPGTGALTAFQNSSEREDCNNGEPPRKIIPEKNSLRQTYNSCARLCLNQETVCLASTAMKTENCVAKTKLANGTSSMIVPKQRKLSASYEKEKELCVKYFEQWSESDQVEFVEHLISQMCHYQHGHINSYLKPMLQRDFITALPARGLDHIAENILSYLDAKSLCAAELVCKEWYRVTSDGMLWKKLIERMVRTDSLWRGLAERRGWGQYLFKNKPPDGNAPPNSFYRALYPKIIQDIETIESNSRGSGSDDLGANDELISFKDEGEQEEKSSENSSAERDLADVKSSLVNESET

SEQ ID NO: 982 - protein, 347 aa, synthetic construct
  source 1..347: note = HA-bTRCP-(GS)3-TCF4 peptide
MYPYDVPDYADPAEAVLQEKALKFMCSMPRSLWLGCSSLADSMPSLRCLYNPGTGALTAFQNSSEREDCNNGEPPRKIIPEKNSLRQTYNSCARLCLNQETVCLASTAMKTENCVAKTKLANGTSSMIVPKQRKLSASYEKEKELCVKYFEQWSESDQVEFVEHLISQMCHYQHGHINSYLKPMLQRDFITALPARGLDHIAENILSYLDAKSLCAAELVCKEWYRVTSDGMLWKKLIERMVRTDSLWRGLAERRGWGQYLFKNKPPDGNAPPNSFYRALYPKIIQDIETIESNSRGSGSGSDDLGANDELISFKDEGEQEEKSSENSSAERDLADVKSSLVNESET

SEQ ID NO: 983 - protein, 349 aa, synthetic construct
  source 1..349: note = HA-bTRCP-(GS)4-TCF4 peptide
MYPYDVPDYADPAEAVLQEKALKFMCSMPRSLWLGCSSLADSMPSLRCLYNPGTGALTAFQNSSEREDCNNGEPPRKIIPEKNSLRQTYNSCARLCLNQETVCLASTAMKTENCVAKTKLANGTSSMIVPKQRKLSASYEKEKELCVKYFEQWSESDQVEFVEHLISQMCHYQHGHINSYLKPMLQRDFITALPARGLDHIAENILSYLDAKSLCAAELVCKEWYRVTSDGMLWKKLIERMVRTDSLWRGLAERRGWGQYLFKNKPPDGNAPPNSFYRALYPKIIQDIETIESNSRGSGSGSGSDDLGANDELISFKDEGEQEEKSSENSSAERDLADVKSSLVNESET

SEQ ID NO: 984 - protein, 351 aa, synthetic construct
  source 1..351: note = HA-bTRCP-(GS)5-TCF4 peptide
MYPYDVPDYADPAEAVLQEKALKFMCSMPRSLWLGCSSLADSMPSLRCLYNPGTGALTAFQNSSEREDCNNGEPPRKIIPEKNSLRQTYNSCARLCLNQETVCLASTAMKTENCVAKTKLANGTSSMIVPKQRKLSASYEKEKELCVKYFEQWSESDQVEFVEHLISQMCHYQHGHINSYLKPMLQRDFITALPARGLDHIAENILSYLDAKSLCAAELVCKEWYRVTSDGMLWKKLIERMVRTDSLWRGLAERRGWGQYLFKNKPPDGNAPPNSFYRALYPKIIQDIETIESNSRGSGSGSGSGSDDLGANDELISFKDEGEQEEKSSENSSAERDLADVKSSLVNESET

SEQ ID NO: 985 - protein, 353 aa, synthetic construct
  source 1..353: note = HA-bTRCP-(GS)6-TCF4 peptide
MYPYDVPDYADPAEAVLQEKALKFMCSMPRSLWLGCSSLADSMPSLRCLYNPGTGALTAFQNSSEREDCNNGEPPRKIIPEKNSLRQTYNSCARLCLNQETVCLASTAMKTENCVAKTKLANGTSSMIVPKQRKLSASYEKEKELCVKYFEQWSESDQVEFVEHLISQMCHYQHGHINSYLKPMLQRDFITALPARGLDHIAENILSYLDAKSLCAAELVCKEWYRVTSDGMLWKKLIERMVRTDSLWRGLAERRGWGQYLFKNKPPDGNAPPNSFYRALYPKIIQDIETIESNSRGSGSGSGSGSGSDDLGANDELISFKDEGEQEEKSSENSSAERDLADVKSSLVNESET

SEQ ID NO: 986 - protein, 368 aa, synthetic construct
  source 1..368: note = Keap1-(GS)1-TCF4 peptide
QPDPRPSGAGACCRFLPLQSQCPEGAGDAVMYASTECKAEVTPSQHGNRTFSYTLEDHTKQAFGIMNELRLSQQLCDVTLQVKYQDAPAAQFMAHKVVLASSSPVFKAMFTNGLREQGMEVVSIEGIHPKVMERLIEFAYTASISMGEKCVLHVMNGAVMYQIDSVVRACSDFLVQQLDPSNAIGIANFAEQIGCVELHQRAREYIYMHFGEVAKQEEFFNLSHCQLVTLISRDDLNVRCESEVFHACINWVKYDCEQRRFYVQALLRAVRCHSLTPNFLQMQLQKCEILQSDSRCKDYLVKIFEELTLHKPTQVMPCRAPGSDDLGANDELISFKDEGEQEEKSSENSSAERDLADVKSSLVNESET

SEQ ID NO: 987 - protein, 370 aa, synthetic construct
  source 1..370: note = Keap1-(GS)2-TCF4 peptide
QPDPRPSGAGACCRFLPLQSQCPEGAGDAVMYASTECKAEVTPSQHGNRTFSYTLEDHTKQAFGIMNELRLSQQLCDVTLQVKYQDAPAAQFMAHKVVLASSSPVFKAMFTNGLREQGMEVVSIEGIHPKVMERLIEFAYTASISMGEKCVLHVMNGAVMYQIDSVVRACSDFLVQQLDPSNAIGIANFAEQIGCVELHQRAREYIYMHFGEVAKQEEFFNLSHCQLVTLISRDDLNVRCESEVFHACINWVKYDCEQRRFYVQALLRAVRCHSLTPNFLQMQLQKCEILQSDSRCKDYLVKIFEELTLHKPTQVMPCRAPGSGSDDLGANDELISFKDEGEQEEKSSENSSAERDLADVKSSLVNESET

SEQ ID NO: 988 - protein, 372 aa, synthetic construct
  source 1..372: note = Keap1-(GS)3-TCF4 peptide
QPDPRPSGAGACCRFLPLQSQCPEGAGDAVMYASTECKAEVTPSQHGNRTFSYTLEDHTKQAFGIMNELRLSQQLCDVTLQVKYQDAPAAQFMAHKVVLASSSPVFKAMFTNGLREQGMEVVSIEGIHPKVMERLIEFAYTASISMGEKCVLHVMNGAVMYQIDSVVRACSDFLVQQLDPSNAIGIANFAEQIGCVELHQRAREYIYMHFGEVAKQEEFFNLSHCQLVTLISRDDLNVRCESEVFHACINWVKYDCEQRRFYVQALLRAVRCHSLTPNFLQMQLQKCEILQSDSRCKDYLVKIFEELTLHKPTQVMPCRAPGSGSGSDDLGANDELISFKDEGEQEEKSSENSSAERDLADVKSSLVNESET

SEQ ID NO: 989 - protein, 374 aa, synthetic construct
  source 1..374: note = Keap1-(GS)4-TCF4 peptide
QPDPRPSGAGACCRFLPLQSQCPEGAGDAVMYASTECKAEVTPSQHGNRTFSYTLEDHTKQAFGIMNELRLSQQLCDVTLQVKYQDAPAAQFMAHKVVLASSSPVFKAMFTNGLREQGMEVVSIEGIHPKVMERLIEFAYTASISMGEKCVLHVMNGAVMYQIDSVVRACSDFLVQQLDPSNAIGIANFAEQIGCVELHQRAREYIYMHFGEVAKQEEFFNLSHCQLVTLISRDDLNVRCESEVFHACINWVKYDCEQRRFYVQALLRAVRCHSLTPNFLQMQLQKCEILQSDSRCKDYLVKIFEELTLHKPTQVMPCRAPGSGSGSGSDDLGANDELISFKDEGEQEEKSSENSSAERDLADVKSSLVNESET

SEQ ID NO: 990 - protein, 376 aa, synthetic construct
  source 1..376: note = Keap1-(GS)5-TCF4 peptide
QPDPRPSGAGACCRFLPLQSQCPEGAGDAVMYASTECKAEVTPSQHGNRTFSYTLEDHTKQAFGIMNELRLSQQLCDVTLQVKYQDAPAAQFMAHKVVLASSSPVFKAMFTNGLREQGMEVVSIEGIHPKVMERLIEFAYTASISMGEKCVLHVMNGAVMYQIDSVVRACSDFLVQQLDPSNAIGIANFAEQIGCVELHQRAREYIYMHFGEVAKQEEFFNLSHCQLVTLISRDDLNVRCESEVFHACINWVKYDCEQRRFYVQALLRAVRCHSLTPNFLQMQLQKCEILQSDSRCKDYLVKIFEELTLHKPTQVMPCRAPGSGSGSGSGSDDLGANDELISFKDEGEQEEKSSENSSAERDLADVKSSLVNESET

SEQ ID NO: 991 - protein, 378 aa, synthetic construct
  source 1..378: note = Keap1-(GS)6-TCF4 peptide
QPDPRPSGAGACCRFLPLQSQCPEGAGDAVMYASTECKAEVTPSQHGNRTFSYTLEDHTKQAFGIMNELRLSQQLCDVTLQVKYQDAPAAQFMAHKVVLASSSPVFKAMFTNGLREQGMEVVSIEGIHPKVMERLIEFAYTASISMGEKCVLHVMNGAVMYQIDSVVRACSDFLVQQLDPSNAIGIANFAEQIGCVELHQRAREYIYMHFGEVAKQEEFFNLSHCQLVTLISRDDLNVRCESEVFHACINWVKYDCEQRRFYVQALLRAVRCHSLTPNFLQMQLQKCEILQSDSRCKDYLVKIFEELTLHKPTQVMPCRAPGSGSGSGSGSGSDDLGANDELISFKDEGEQEEKSSENSSAERDLADVKSSLVNESET

SEQ ID NO: 992 - protein, 384 aa, synthetic construct
  source 1..384: note = HA-Keap1-(GS)1-TCF4 peptide
MYPYDVPDYAGSGSGSQPDPRPSGAGACCRFLPLQSQCPEGAGDAVMYASTECKAEVTPSQHGNRTFSYTLEDHTKQAFGIMNELRLSQQLCDVTLQVKYQDAPAAQFMAHKVVLASSSPVFKAMFTNGLREQGMEVVSIEGIHPKVMERLIEFAYTASISMGEKCVLHVMNGAVMYQIDSVVRACSDFLVQQLDPSNAIGIANFAEQIGCVELHQRAREYIYMHFGEVAKQEEFFNLSHCQLVTLISRDDLNVRCESEVFHACINWVKYDCEQRRFYVQALLRAVRCHSLTPNFLQMQLQKCEILQSDSRCKDYLVKIFEELTLHKPTQVMPCRAPGSDDLGANDELISFKDEGEQEEKSSENSSAERDLADVKSSLVNESET

SEQ ID NO: 993 - protein, 386 aa, synthetic construct
  source 1..386: note = HA-Keap1-(GS)2-TCF4 peptide
MYPYDVPDYAGSGSGSQPDPRPSGAGACCRFLPLQSQCPEGAGDAVMYASTECKAEVTPSQHGNRTFSYTLEDHTKQAFGIMNELRLSQQLCDVTLQVKYQDAPAAQFMAHKVVLASSSPVFKAMFTNGLREQGMEVVSIEGIHPKVMERLIEFAYTASISMGEKCVLHVMNGAVMYQIDSVVRACSDFLVQQLDPSNAIGIANFAEQIGCVELHQRAREYIYMHFGEVAKQEEFFNLSHCQLVTLISRDDLNVRCESEVFHACINWVKYDCEQRRFYVQALLRAVRCHSLTPNFLQMQLQKCEILQSDSRCKDYLVKIFEELTLHKPTQVMPCRAPGSGSDDLGANDELISFKDEGEQEEKSSENSSAERDLADVKSSLVNESET

SEQ ID NO: 994 - protein, 388 aa, synthetic construct
  source 1..388: note = HA-Keap1-(GS)3-TCF4 peptide
MYPYDVPDYAGSGSGSQPDPRPSGAGACCRFLPLQSQCPEGAGDAVMYASTECKAEVTPSQHGNRTFSYTLEDHTKQAFGIMNELRLSQQLCDVTLQVKYQDAPAAQFMAHKVVLASSSPVFKAMFTNGLREQGMEVVSIEGIHPKVMERLIEFAYTASISMGEKCVLHVMNGAVMYQIDSVVRACSDFLVQQLDPSNAIGIANFAEQIGCVELHQRAREYIYMHFGEVAKQEEFFNLSHCQLVTLISRDDLNVRCESEVFHACINWVKYDCEQRRFYVQALLRAVRCHSLTPNFLQMQLQKCEILQSDSRCKDYLVKIFEELTLHKPTQVMPCRAPGSGSGSDDLGANDELISFKDEGEQEEKSSENSSAERDLADVKSSLVNESET

SEQ ID NO: 995 - protein, 390 aa, synthetic construct
  source 1..390: note = HA-Keap1-(GS)4-TCF4 peptide
MYPYDVPDYAGSGSGSQPDPRPSGAGACCRFLPLQSQCPEGAGDAVMYASTECKAEVTPSQHGNRTFSYTLEDHTKQAFGIMNELRLSQQLCDVTLQVKYQDAPAAQFMAHKVVLASSSPVFKAMFTNGLREQGMEVVSIEGIHPKVMERLIEFAYTASISMGEKCVLHVMNGAVMYQIDSVVRACSDFLVQQLDPSNAIGIANFAEQIGCVELHQRAREYIYMHFGEVAKQEEFFNLSHCQLVTLISRDDLNVRCESEVFHACINWVKYDCEQRRFYVQALLRAVRCHSLTPNFLQMQLQKCEILQSDSRCKDYLVKIFEELTLHKPTQVMPCRAPGSGSGSGSDDLGANDELISFKDEGEQEEKSSENSSAERDLADVKSSLVNESET

SEQ ID NO: 996 - protein, 392 aa, synthetic construct
  source 1..392: note = HA-Keap1-(GS)5-TCF4 peptide
MYPYDVPDYAGSGSGSQPDPRPSGAGACCRFLPLQSQCPEGAGDAVMYASTECKAEVTPSQHGNRTFSYTLEDHTKQAFGIMNELRLSQQLCDVTLQVKYQDAPAAQFMAHKVVLASSSPVFKAMFTNGLREQGMEVVSIEGIHPKVMERLIEFAYTASISMGEKCVLHVMNGAVMYQIDSVVRACSDFLVQQLDPSNAIGIANFAEQIGCVELHQRAREYIYMHFGEVAKQEEFFNLSHCQLVTLISRDDLNVRCESEVFHACINWVKYDCEQRRFYVQALLRAVRCHSLTPNFLQMQLQKCEILQSDSRCKDYLVKIFEELTLHKPTQVMPCRAPGSGSGSGSGSDDLGANDELISFKDEGEQEEKSSENSSAERDLADVKSSLVNESET

SEQ ID NO: 997 - protein, 394 aa, synthetic construct
  source 1..394: note = HA-Keap1-(GS)6-TCF4 peptide
MYPYDVPDYAGSGSGSQPDPRPSGAGACCRFLPLQSQCPEGAGDAVMYASTECKAEVTPSQHGNRTFSYTLEDHTKQAFGIMNELRLSQQLCDVTLQVKYQDAPAAQFMAHKVVLASSSPVFKAMFTNGLREQGMEVVSIEGIHPKVMERLIEFAYTASISMGEKCVLHVMNGAVMYQIDSVVRACSDFLVQQLDPSNAIGIANFAEQIGCVELHQRAREYIYMHFGEVAKQEEFFNLSHCQLVTLISRDDLNVRCESEVFHACINWVKYDCEQRRFYVQALLRAVRCHSLTPNFLQMQLQKCEILQSDSRCKDYLVKIFEELTLHKPTQVMPCRAPGSGSGSGSGSGSDDLGANDELISFKDEGEQEEKSSENSSAERDLADVKSSLVNESET

SEQ ID NO: 998 - protein, 174 aa, synthetic construct
  source 1..174: note = RNF125-(GS)1-TCF4 peptide
GSVLSTDSGKSAPASATARALERRRDPELPVTSFDCAVCLEVLHQPVRTRCGHVFCRSCIATSLKNNKWTCPYCRAYLPSEGVPATDVAKRMKSEYKNCAECDTLVCLSEMRAHIRTCQKYIDKYGPGSDDLGANDELISFKDEGEQEEKSSENSSAERDLADVKSSLVNESET

SEQ ID NO: 999 - protein, 176 aa, synthetic construct
  source 1..176: note = RNF125-(GS)2-TCF4 peptide
GSVLSTDSGKSAPASATARALERRRDPELPVTSFDCAVCLEVLHQPVRTRCGHVFCRSCIATSLKNNKWTCPYCRAYLPSEGVPATDVAKRMKSEYKNCAECDTLVCLSEMRAHIRTCQKYIDKYGPGSGSDDLGANDELISFKDEGEQEEKSSENSSAERDLADVKSSLVNESET

SEQ ID NO: 1000 - protein, 178 aa, synthetic construct
  source 1..178: note = RNF125-(GS)3-TCF4 peptide
GSVLSTDSGKSAPASATARALERRRDPELPVTSFDCAVCLEVLHQPVRTRCGHVFCRSCIATSLKNNKWTCPYCRAYLPSEGVPATDVAKRMKSEYKNCAECDTLVCLSEMRAHIRTCQKYIDKYGPGSGSGSDDLGANDELISFKDEGEQEEKSSENSSAERDLADVKSSLVNESET

SEQ ID NO: 1001 - protein, 180 aa, synthetic construct
  source 1..180: note = RNF125-(GS)4-TCF4 peptide
GSVLSTDSGKSAPASATARALERRRDPELPVTSFDCAVCLEVLHQPVRTRCGHVFCRSCIATSLKNNKWTCPYCRAYLPSEGVPATDVAKRMKSEYKNCAECDTLVCLSEMRAHIRTCQKYIDKYGPGSGSGSGSDDLGANDELISFKDEGEQEEKSSENSSAERDLADVKSSLVNESET

SEQ ID NO: 1002 - protein, 182 aa, synthetic construct
  source 1..182: note = RNF125-(GS)5-TCF4 peptide
GSVLSTDSGKSAPASATARALERRRDPELPVTSFDCAVCLEVLHQPVRTRCGHVFCRSCIATSLKNNKWTCPYCRAYLPSEGVPATDVAKRMKSEYKNCAECDTLVCLSEMRAHIRTCQKYIDKYGPGSGSGSGSGSDDLGANDELISFKDEGEQEEKSSENSSAERDLADVKSSLVNESET

SEQ ID NO: 1003 - protein, 184 aa, synthetic construct
  source 1..184: note = RNF125-(GS)6-TCF4 peptide
GSVLSTDSGKSAPASATARALERRRDPELPVTSFDCAVCLEVLHQPVRTRCGHVFCRSCIATSLKNNKWTCPYCRAYLPSEGVPATDVAKRMKSEYKNCAECDTLVCLSEMRAHIRTCQKYIDKYGPGSGSGSGSGSGSDDLGANDELISFKDEGEQEEKSSENSSAERDLADVKSSLVNESET

SEQ ID NO: 1004 - protein, 190 aa, synthetic construct
  source 1..190: note = HA-RNF125-(GS)1-TCF4 peptide
MYPYDVPDYAGSGSGSGSVLSTDSGKSAPASATARALERRRDPELPVTSFDCAVCLEVLHQPVRTRCGHVFCRSCIATSLKNNKWTCPYCRAYLPSEGVPATDVAKRMKSEYKNCAECDTLVCLSEMRAHIRTCQKYIDKYGPGSDDLGANDELISFKDEGEQEEKSSENSSAERDLADVKSSLVNESET

SEQ ID NO: 1005 - protein, 192 aa, synthetic construct
  source 1..192: note = HA-RNF125-(GS)2-TCF4 peptide
MYPYDVPDYAGSGSGSGSVLSTDSGKSAPASATARALERRRDPELPVTSFDCAVCLEVLHQPVRTRCGHVFCRSCIATSLKNNKWTCPYCRAYLPSEGVPATDVAKRMKSEYKNCAECDTLVCLSEMRAHIRTCQKYIDKYGPGSGSDDLGANDELISFKDEGEQEEKSSENSSAERDLADVKSSLVNESET

SEQ ID NO: 1006 - protein, 194 aa, synthetic construct
  source 1..194: note = HA-RNF125-(GS)3-TCF4 peptide
MYPYDVPDYAGSGSGSGSVLSTDSGKSAPASATARALERRRDPELPVTSFDCAVCLEVLHQPVRTRCGHVFCRSCIATSLKNNKWTCPYCRAYLPSEGVPATDVAKRMKSEYKNCAECDTLVCLSEMRAHIRTCQKYIDKYGPGSGSGSDDLGANDELISFKDEGEQEEKSSENSSAERDLADVKSSLVNESET

SEQ ID NO: 1007 - protein, 196 aa, synthetic construct
  source 1..196: note = HA-RNF125-(GS)4-TCF4 peptide
MYPYDVPDYAGSGSGSGSVLSTDSGKSAPASATARALERRRDPELPVTSFDCAVCLEVLHQPVRTRCGHVFCRSCIATSLKNNKWTCPYCRAYLPSEGVPATDVAKRMKSEYKNCAECDTLVCLSEMRAHIRTCQKYIDKYGPGSGSGSGSDDLGANDELISFKDEGEQEEKSSENSSAERDLADVKSSLVNESET

SEQ ID NO: 1008 - protein, 198 aa, synthetic construct
  source 1..198: note = HA-RNF125-(GS)5-TCF4 peptide
MYPYDVPDYAGSGSGSGSVLSTDSGKSAPASATARALERRRDPELPVTSFDCAVCLEVLHQPVRTRCGHVFCRSCIATSLKNNKWTCPYCRAYLPSEGVPATDVAKRMKSEYKNCAECDTLVCLSEMRAHIRTCQKYIDKYGPGSGSGSGSGSDDLGANDELISFKDEGEQEEKSSENSSAERDLADVKSSLVNESET

SEQ ID NO: 1009 - protein, 200 aa, synthetic construct
  source 1..200: note = HA-RNF125-(GS)6-TCF4 peptide
MYPYDVPDYAGSGSGSGSVLSTDSGKSAPASATARALERRRDPELPVTSFDCAVCLEVLHQPVRTRCGHVFCRSCIATSLKNNKWTCPYCRAYLPSEGVPATDVAKRMKSEYKNCAECDTLVCLSEMRAHIRTCQKYIDKYGPGSGSGSGSGSGSDDLGANDELISFKDEGEQEEKSSENSSAERDLADVKSSLVNESET

SEQ ID NO: 1010 - protein, 314 aa, synthetic construct
  source 1..314: note = BC2-(GS)1-CHIP-NLS peptide
MQVQLVESGGGLVQPGGSLTLSCTASGFTLDHYDIGWFRQAPGKEREGVSCINNSDDDTYYADSVKGRFTIFMNNAKDTVYLQMNSLKPEDTAIYYCAEARGCKRGRYEYDFWGQGTQVTVSSGSRLNFGDDIPSALRIAKKKRWNSIEERRIHQESELHSYLSRLIAAERERELEECQRNHEGDEDDSHVRAQQACIEAKHDKYMADMDELFSQVDEKRKKRDIPDYLCGKISFELMREPCITPSGITYDRKDIEEHLQRVGHFDPVTRSPLTQEQLIPNLAMKEVIDAFISENGWVEDYGSGSPAAKRVKLD

SEQ ID NO: 1011 - protein, 316 aa, synthetic construct
  source 1..316: note = BC2-(GS)2-CHIP-NLS peptide
MQVQLVESGGGLVQPGGSLTLSCTASGFTLDHYDIGWFRQAPGKEREGVSCINNSDDDTYYADSVKGRFTIFMNNAKDTVYLQMNSLKPEDTAIYYCAEARGCKRGRYEYDFWGQGTQVTVSSGSGSRLNFGDDIPSALRIAKKKRWNSIEERRIHQESELHSYLSRLIAAERERELEECQRNHEGDEDDSHVRAQQACIEAKHDKYMADMDELFSQVDEKRKKRDIPDYLCGKISFELMREPCITPSGITYDRKDIEEHLQRVGHFDPVTRSPLTQEQLIPNLAMKEVIDAFISENGWVEDYGSGSPAAKRVKLD

SEQ ID NO: 1012 - protein, 318 aa, synthetic construct
  source 1..318: note = BC2-(GS)3-CHIP-NLS peptide
MQVQLVESGGGLVQPGGSLTLSCTASGFTLDHYDIGWFRQAPGKEREGVSCINNSDDDTYYADSVKGRFTIFMNNAKDTVYLQMNSLKPEDTAIYYCAEARGCKRGRYEYDFWGQGTQVTVSSGSGSGSRLNFGDDIPSALRIAKKKRWNSIEERRIHQESELHSYLSRLIAAERERELEECQRNHEGDEDDSHVRAQQACIEAKHDKYMADMDELFSQVDEKRKKRDIPDYLCGKISFELMREPCITPSGITYDRKDIEEHLQRVGHFDPVTRSPLTQEQLIPNLAMKEVIDAFISENGWVEDYGSGSPAAKRVKLD

SEQ ID NO: 1013 - protein, 320 aa, synthetic construct
  source 1..320: note = BC2-(GS)4-CHIP-NLS peptide
MQVQLVESGGGLVQPGGSLTLSCTASGFTLDHYDIGWFRQAPGKEREGVSCINNSDDDTYYADSVKGRFTIFMNNAKDTVYLQMNSLKPEDTAIYYCAEARGCKRGRYEYDFWGQGTQVTVSSGSGSGSGSRLNFGDDIPSALRIAKKKRWNSIEERRIHQESELHSYLSRLIAAERERELEECQRNHEGDEDDSHVRAQQACIEAKHDKYMADMDELFSQVDEKRKKRDIPDYLCGKISFELMREPCITPSGITYDRKDIEEHLQRVGHFDPVTRSPLTQEQLIPNLAMKEVIDAFISENGWVEDYGSGSPAAKRVKLD

SEQ ID NO: 1014 - protein, 322 aa, synthetic construct
  source 1..322: note = BC2-(GS)5-CHIP-NLS peptide
MQVQLVESGGGLVQPGGSLTLSCTASGFTLDHYDIGWFRQAPGKEREGVSCINNSDDDTYYADSVKGRFTIFMNNAKDTVYLQMNSLKPEDTAIYYCAEARGCKRGRYEYDFWGQGTQVTVSSGSGSGSGSGSRLNFGDDIPSALRIAKKKRWNSIEERRIHQESELHSYLSRLIAAERERELEECQRNHEGDEDDSHVRAQQACIEAKHDKYMADMDELFSQVDEKRKKRDIPDYLCGKISFELMREPCITPSGITYDRKDIEEHLQRVGHFDPVTRSPLTQEQLIPNLAMKEVIDAFISENGWVEDYGSGSPAAKRVKLD

SEQ ID NO: 1015 - protein, 324 aa, synthetic construct
  source 1..324: note = BC2-(GS)6-CHIP-NLS peptide
MQVQLVESGGGLVQPGGSLTLSCTASGFTLDHYDIGWFRQAPGKEREGVSCINNSDDDTYYADSVKGRFTIFMNNAKDTVYLQMNSLKPEDTAIYYCAEARGCKRGRYEYDFWGQGTQVTVSSGSGSGSGSGSGSRLNFGDDIPSALRIAKKKRWNSIEERRIHQESELHSYLSRLIAAERERELEECQRNHEGDEDDSHVRAQQACIEAKHDKYMADMDELFSQVDEKRKKRDIPDYLCGKISFELMREPCITPSGITYDRKDIEEHLQRVGHFDPVTRSPLTQEQLIPNLAMKEVIDAFISENGWVEDYGSGSPAAKRVKLD

SEQ ID NO: 1016 - protein, 323 aa, synthetic construct
  source 1..323: note = BC2-(GS)1-CHIP-NLS-HA peptide
MQVQLVESGGGLVQPGGSLTLSCTASGFTLDHYDIGWFRQAPGKEREGVSCINNSDDDTYYADSVKGRFTIFMNNAKDTVYLQMNSLKPEDTAIYYCAEARGCKRGRYEYDFWGQGTQVTVSSGSRLNFGDDIPSALRIAKKKRWNSIEERRIHQESELHSYLSRLIAAERERELEECQRNHEGDEDDSHVRAQQACIEAKHDKYMADMDELFSQVDEKRKKRDIPDYLCGKISFELMREPCITPSGITYDRKDIEEHLQRVGHFDPVTRSPLTQEQLIPNLAMKEVIDAFISENGWVEDYGSGSPAAKRVKLDYPYDVPDYA

SEQ ID NO: 1017 - protein, 325 aa, synthetic construct
  source 1..325: note = BC2-(GS)2-CHIP-NLS-HA peptide
MQVQLVESGGGLVQPGGSLTLSCTASGFTLDHYDIGWFRQAPGKEREGVSCINNSDDDTYYADSVKGRFTIFMNNAKDTVYLQMNSLKPEDTAIYYCAEARGCKRGRYEYDFWGQGTQVTVSSGSGSRLNFGDDIPSALRIAKKKRWNSIEERRIHQESELHSYLSRLIAAERERELEECQRNHEGDEDDSHVRAQQACIEAKHDKYMADMDELFSQVDEKRKKRDIPDYLCGKISFELMREPCITPSGITYDRKDIEEHLQRVGHFDPVTRSPLTQEQLIPNLAMKEVIDAFISENGWVEDYGSGSPAAKRVKLDYPYDVPDYA

SEQ ID NO: 1018 - protein, 327 aa, synthetic construct
  source 1..327: note = BC2-(GS)3-CHIP-NLS-HA peptide
MQVQLVESGGGLVQPGGSLTLSCTASGFTLDHYDIGWFRQAPGKEREGVSCINNSDDDTYYADSVKGRFTIFMNNAKDTVYLQMNSLKPEDTAIYYCAEARGCKRGRYEYDFWGQGTQVTVSSGSGSGSRLNFGDDIPSALRIAKKKRWNSIEERRIHQESELHSYLSRLIAAERERELEECQRNHEGDEDDSHVRAQQACIEAKHDKYMADMDELFSQVDEKRKKRDIPDYLCGKISFELMREPCITPSGITYDRKDIEEHLQRVGHFDPVTRSPLTQEQLIPNLAMKEVIDAFISENGWVEDYGSGSPAAKRVKLDYPYDVPDYA

SEQ ID NO: 1019 - protein, 329 aa, synthetic construct
  source 1..329: note = BC2-(GS)4-CHIP-NLS-HA peptide
MQVQLVESGGGLVQPGGSLTLSCTASGFTLDHYDIGWFRQAPGKEREGVSCINNSDDDTYYADSVKGRFTIFMNNAKDTVYLQMNSLKPEDTAIYYCAEARGCKRGRYEYDFWGQGTQVTVSSGSGSGSGSRLNFGDDIPSALRIAKKKRWNSIEERRIHQESELHSYLSRLIAAERERELEECQRNHEGDEDDSHVRAQQACIEAKHDKYMADMDELFSQVDEKRKKRDIPDYLCGKISFELMREPCITPSGITYDRKDIEEHLQRVGHFDPVTRSPLTQEQLIPNLAMKEVIDAFISENGWVEDYGSGSPAAKRVKLDYPYDVPDYA

SEQ ID NO: 1020 - protein, 331 aa, synthetic construct
  source 1..331: note = BC2-(GS)5-CHIP-NLS-HA peptide
MQVQLVESGGGLVQPGGSLTLSCTASGFTLDHYDIGWFRQAPGKEREGVSCINNSDDDTYYADSVKGRFTIFMNNAKDTVYLQMNSLKPEDTAIYYCAEARGCKRGRYEYDFWGQGTQVTVSSGSGSGSGSGSRLNFGDDIPSALRIAKKKRWNSIEERRIHQESELHSYLSRLIAAERERELEECQRNHEGDEDDSHVRAQQACIEAKHDKYMADMDELFSQVDEKRKKRDIPDYLCGKISFELMREPCITPSGITYDRKDIEEHLQRVGHFDPVTRSPLTQEQLIPNLAMKEVIDAFISENGWVEDYGSGSPAAKRVKLDYPYDVPDYA

SEQ ID NO: 1021 - protein, 333 aa, synthetic construct
  source 1..333: note = BC2-(GS)6-CHIP-NLS-HA peptide
MQVQLVESGGGLVQPGGSLTLSCTASGFTLDHYDIGWFRQAPGKEREGVSCINNSDDDTYYADSVKGRFTIFMNNAKDTVYLQMNSLKPEDTAIYYCAEARGCKRGRYEYDFWGQGTQVTVSSGSGSGSGSGSGSRLNFGDDIPSALRIAKKKRWNSIEERRIHQESELHSYLSRLIAAERERELEECQRNHEGDEDDSHVRAQQACIEAKHDKYMADMDELFSQVDEKRKKRDIPDYLCGKISFELMREPCITPSGITYDRKDIEEHLQRVGHFDPVTRSPLTQEQLIPNLAMKEVIDAFISENGWVEDYGSGSPAAKRVKLDYPYDVPDYA

SEQ ID NO: 1022 - protein, 174 aa, synthetic construct
  source 1..174: note = NLS-DCAF1-(GS)1-BC2 peptide
PAAKRVKLDGSGSGSQAPINFTSRLNRRASFPKYGGVDGGCFDRHLIFSRGSQVQLVESGGGLVQPGGSLTLSCTASGFTLDHYDIGWFRQAPGKEREGVSCINNSDDDTYYADSVKGRFTIFMNNAKDTVYLQMNSLKPEDTAIYYCAEARGCKRGRYEYDFWGQGTQVTVSS

SEQ ID NO: 1023 - protein, 176 aa, synthetic construct
  source 1..176: note = NLS-DCAF1-(GS)2-BC2 peptide
PAAKRVKLDGSGSGSQAPINFTSRLNRRASFPKYGGVDGGCFDRHLIFSRGSGSQVQLVESGGGLVQPGGSLTLSCTASGFTLDHYDIGWFRQAPGKEREGVSCINNSDDDTYYADSVKGRFTIFMNNAKDTVYLQMNSLKPEDTAIYYCAEARGCKRGRYEYDFWGQGTQVTVSS

SEQ ID NO: 1024 - protein, 178 aa, synthetic construct
  source 1..178: note = NLS-DCAF1-(GS)3-BC2 peptide
PAAKRVKLDGSGSGSQAPINFTSRLNRRASFPKYGGVDGGCFDRHLIFSRGSGSGSQVQLVESGGGLVQPGGSLTLSCTASGFTLDHYDIGWFRQAPGKEREGVSCINNSDDDTYYADSVKGRFTIFMNNAKDTVYLQMNSLKPEDTAIYYCAEARGCKRGRYEYDFWGQGTQVTVSS

SEQ ID NO: 1025 - protein, 180 aa, synthetic construct
  source 1..180: note = NLS-DCAF1-(GS)4-BC2 peptide
PAAKRVKLDGSGSGSQAPINFTSRLNRRASFPKYGGVDGGCFDRHLIFSRGSGSGSGSQVQLVESGGGLVQPGGSLTLSCTASGFTLDHYDIGWFRQAPGKEREGVSCINNSDDDTYYADSVKGRFTIFMNNAKDTVYLQMNSLKPEDTAIYYCAEARGCKRGRYEYDFWGQGTQVTVSS

SEQ ID NO: 1026 - protein, 182 aa, synthetic construct
  source 1..182: note = NLS-DCAF1-(GS)5-BC2 peptide
PAAKRVKLDGSGSGSQAPINFTSRLNRRASFPKYGGVDGGCFDRHLIFSRGSGSGSGSGSQVQLVESGGGLVQPGGSLTLSCTASGFTLDHYDIGWFRQAPGKEREGVSCINNSDDDTYYADSVKGRFTIFMNNAKDTVYLQMNSLKPEDTAIYYCAEARGCKRGRYEYDFWGQGTQVTVSS

SEQ ID NO: 1027 - protein, 184 aa, synthetic construct
  source 1..184: note = NLS-DCAF1-(GS)6-BC2 peptide
PAAKRVKLDGSGSGSQAPINFTSRLNRRASFPKYGGVDGGCFDRHLIFSRGSGSGSGSGSGSQVQLVESGGGLVQPGGSLTLSCTASGFTLDHYDIGWFRQAPGKEREGVSCINNSDDDTYYADSVKGRFTIFMNNAKDTVYLQMNSLKPEDTAIYYCAEARGCKRGRYEYDFWGQGTQVTVSS

SEQ ID NO: 1028 - protein, 184 aa, synthetic construct
  source 1..184: note = HA-NLS-DCAF1-(GS)1-BC2 peptide
MYPYDVPDYAPAAKRVKLDGSGSGSQAPINFTSRLNRRASFPKYGGVDGGCFDRHLIFSRGSQVQLVESGGGLVQPGGSLTLSCTASGFTLDHYDIGWFRQAPGKEREGVSCINNSDDDTYYADSVKGRFTIFMNNAKDTVYLQMNSLKPEDTAIYYCAEARGCKRGRYEYDFWGQGTQVTVSS

SEQ ID NO: 1029 - protein, 186 aa, synthetic construct
  source 1..186: note = HA-NLS-DCAF1-(GS)2-BC2 peptide
MYPYDVPDYAPAAKRVKLDGSGSGSQAPINFTSRLNRRASFPKYGGVDGGCFDRHLIFSRGSGSQVQLVESGGGLVQPGGSLTLSCTASGFTLDHYDIGWFRQAPGKEREGVSCINNSDDDTYYADSVKGRFTIFMNNAKDTVYLQMNSLKPEDTAIYYCAEARGCKRGRYEYDFWGQGTQVTVSS

SEQ ID NO: 1030 - protein, 188 aa, synthetic construct
  source 1..188: note = HA-NLS-DCAF1-(GS)3-BC2 peptide
MYPYDVPDYAPAAKRVKLDGSGSGSQAPINFTSRLNRRASFPKYGGVDGGCFDRHLIFSRGSGSGSQVQLVESGGGLVQPGGSLTLSCTASGFTLDHYDIGWFRQAPGKEREGVSCINNSDDDTYYADSVKGRFTIFMNNAKDTVYLQMNSLKPEDTAIYYCAEARGCKRGRYEYDFWGQGTQVTVSS

SEQ ID NO: 1031 - protein, 190 aa, synthetic construct
  source 1..190: note = HA-NLS-DCAF1-(GS)4-BC2 peptide
MYPYDVPDYAPAAKRVKLDGSGSGSQAPINFTSRLNRRASFPKYGGVDGGCFDRHLIFSRGSGSGSGSQVQLVESGGGLVQPGGSLTLSCTASGFTLDHYDIGWFRQAPGKEREGVSCINNSDDDTYYADSVKGRFTIFMNNAKDTVYLQMNSLKPEDTAIYYCAEARGCKRGRYEYDFWGQGTQVTVSS

SEQ ID NO: 1032 - protein, 192 aa, synthetic construct
  source 1..192: note = HA-NLS-DCAF1-(GS)5-BC2 peptide
MYPYDVPDYAPAAKRVKLDGSGSGSQAPINFTSRLNRRASFPKYGGVDGGCFDRHLIFSRGSGSGSGSGSQVQLVESGGGLVQPGGSLTLSCTASGFTLDHYDIGWFRQAPGKEREGVSCINNSDDDTYYADSVKGRFTIFMNNAKDTVYLQMNSLKPEDTAIYYCAEARGCKRGRYEYDFWGQGTQVTVSS

SEQ ID NO: 1033 - protein, 194 aa, synthetic construct
  source 1..194: note = HA-NLS-DCAF1-(GS)6-BC2 peptide
MYPYDVPDYAPAAKRVKLDGSGSGSQAPINFTSRLNRRASFPKYGGVDGGCFDRHLIFSRGSGSGSGSGSGSQVQLVESGGGLVQPGGSLTLSCTASGFTLDHYDIGWFRQAPGKEREGVSCINNSDDDTYYADSVKGRFTIFMNNAKDTVYLQMNSLKPEDTAIYYCAEARGCKRGRYEYDFWGQGTQVTVSS

SEQ ID NO: 1034 - protein, 495 aa, synthetic construct
  source 1..495: note = NLS-BC2-(GS)1-E6AP peptide
PAAKRVKLDGSGSGSQVQLVESGGGLVQPGGSLTLSCTASGFTLDHYDIGWFRQAPGKEREGVSCINNSDDDTYYADSVKGRFTIFMNNAKDTVYLQMNSLKPEDTAIYYCAEARGCKRGRYEYDFWGQGTQVTVSSGSNPYLRLKVRRDHIIDDALVRLEMIAMENPADLKKQLYVEFEGEQGVDEGGVSKEFFQLVVEEIFNPDIGMFTYDESTKLFWFNPSSFETEGQFTLIGIVLGLAIYNNCILDVHFPMVVYRKLMGKKGTFRDLGDSHPVLYQSLKDLLEYEGNVEDDMMITFQISQTDLFGNPMMYDLKENGDKIPITNENRKEFVNLYSDYILNKSVEKQFKAFRRGFHMVTNESPLKYLFRPEEIELLICGSRNLDFQALEETTEYDGGYTRDSVLIREFWEIVHSFTDEQKRLFLQFTTGTDRAPVGGLGKLKMIIAKNGPDTERLPTSHTCFNVLLLPEYSSKEKLKERLLKAITYAKGFGML

SEQ ID NO: 1035 - protein, 497 aa, synthetic construct
  source 1..497: note = NLS-BC2-(GS)2-E6AP peptide
PAAKRVKLDGSGSGSQVQLVESGGGLVQPGGSLTLSCTASGFTLDHYDIGWFRQAPGKEREGVSCINNSDDDTYYADSVKGRFTIFMNNAKDTVYLQMNSLKPEDTAIYYCAEARGCKRGRYEYDFWGQGTQVTVSSGSGSNPYLRLKVRRDHIIDDALVRLEMIAMENPADLKKQLYVEFEGEQGVDEGGVSKEFFQLVVEEIFNPDIGMFTYDESTKLFWFNPSSFETEGQFTLIGIVLGLAIYNNCILDVHFPMVVYRKLMGKKGTFRDLGDSHPVLYQSLKDLLEYEGNVEDDMMITFQISQTDLFGNPMMYDLKENGDKIPITNENRKEFVNLYSDYILNKSVEKQFKAFRRGFHMVTNESPLKYLFRPEEIELLICGSRNLDFQALEETTEYDGGYTRDSVLIREFWEIVHSFTDEQKRLFLQFTTGTDRAPVGGLGKLKMIIAKNGPDTERLPTSHTCFNVLLLPEYSSKEKLKERLLKAITYAKGFGML

SEQ ID NO: 1036 - protein, 499 aa, synthetic construct
  source 1..499: note = NLS-BC2(GS)3-E6AP peptide
PAAKRVKLDGSGSGSQVQLVESGGGLVQPGGSLTLSCTASGFTLDHYDIGWFRQAPGKEREGVSCINNSDDDTYYADSVKGRFTIFMNNAKDTVYLQMNSLKPEDTAIYYCAEARGCKRGRYEYDFWGQGTQVTVSSGSGSGSNPYLRLKVRRDHIIDDALVRLEMIAMENPADLKKQLYVEFEGEQGVDEGGVSKEFFQLVVEEIFNPDIGMFTYDESTKLFWFNPSSFETEGQFTLIGIVLGLAIYNNCILDVHFPMVVYRKLMGKKGTFRDLGDSHPVLYQSLKDLLEYEGNVEDDMMITFQISQTDLFGNPMMYDLKENGDKIPITNENRKEFVNLYSDYILNKSVEKQFKAFRRGFHMVTNESPLKYLFRPEEIELLICGSRNLDFQALEETTEYDGGYTRDSVLIREFWEIVHSFTDEQKRLFLQFTTGTDRAPVGGLGKLKMIIAKNGPDTERLPTSHTCFNVLLLPEYSSKEKLKERLLKAITYAKGFGML

SEQ ID NO: 1037 - protein, 501 aa, synthetic construct
  source 1..501: note = NLS-BC2-(GS)4-E6AP peptide
PAAKRVKLDGSGSGSQVQLVESGGGLVQPGGSLTLSCTASGFTLDHYDIGWFRQAPGKEREGVSCINNSDDDTYYADSVKGRFTIFMNNAKDTVYLQMNSLKPEDTAIYYCAEARGCKRGRYEYDFWGQGTQVTVSSGSGSGSGSNPYLRLKVRRDHIIDDALVRLEMIAMENPADLKKQLYVEFEGEQGVDEGGVSKEFFQLVVEEIFNPDIGMFTYDESTKLFWFNPSSFETEGQFTLIGIVLGLAIYNNCILDVHFPMVVYRKLMGKKGTFRDLGDSHPVLYQSLKDLLEYEGNVEDDMMITFQISQTDLFGNPMMYDLKENGDKIPITNENRKEFVNLYSDYILNKSVEKQFKAFRRGFHMVTNESPLKYLFRPEEIELLICGSRNLDFQALEETTEYDGGYTRDSVLIREFWEIVHSFTDEQKRLFLQFTTGTDRAPVGGLGKLKMIIAKNGPDTERLPTSHTCFNVLLLPEYSSKEKLKERLLKAITYAKGFGML

SEQ ID NO: 1038 - protein, 503 aa, synthetic construct
  source 1..503: note = NLS-BC2-(GS)5-E6AP peptide
PAAKRVKLDGSGSGSQVQLVESGGGLVQPGGSLTLSCTASGFTLDHYDIGWFRQAPGKEREGVSCINNSDDDTYYADSVKGRFTIFMNNAKDTVYLQMNSLKPEDTAIYYCAEARGCKRGRYEYDFWGQGTQVTVSSGSGSGSGSGSNPYLRLKVRRDHIIDDALVRLEMIAMENPADLKKQLYVEFEGEQGVDEGGVSKEFFQLVVEEIFNPDIGMFTYDESTKLFWFNPSSFETEGQFTLIGIVLGLAIYNNCILDVHFPMVVYRKLMGKKGTFRDLGDSHPVLYQSLKDLLEYEGNVEDDMMITFQISQTDLFGNPMMYDLKENGDKIPITNENRKEFVNLYSDYILNKSVEKQFKAFRRGFHMVTNESPLKYLFRPEEIELLICGSRNLDFQALEETTEYDGGYTRDSVLIREFWEIVHSFTDEQKRLFLQFTTGTDRAPVGGLGKLKMIIAKNGPDTERLPTSHTCFNVLLLPEYSSKEKLKERLLKAITYAKGFGML

SEQ ID NO: 1039 - protein, 505 aa, synthetic construct
  source 1..505: note = NLS-BC2-(GS)6-E6AP peptide
PAAKRVKLDGSGSGSQVQLVESGGGLVQPGGSLTLSCTASGFTLDHYDIGWFRQAPGKEREGVSCINNSDDDTYYADSVKGRFTIFMNNAKDTVYLQMNSLKPEDTAIYYCAEARGCKRGRYEYDFWGQGTQVTVSSGSGSGSGSGSGSNPYLRLKVRRDHIIDDALVRLEMIAMENPADLKKQLYVEFEGEQGVDEGGVSKEFFQLVVEEIFNPDIGMFTYDESTKLFWFNPSSFETEGQFTLIGIVLGLAIYNNCILDVHFPMVVYRKLMGKKGTFRDLGDSHPVLYQSLKDLLEYEGNVEDDMMITFQISQTDLFGNPMMYDLKENGDKIPITNENRKEFVNLYSDYILNKSVEKQFKAFRRGFHMVTNESPLKYLFRPEEIELLICGSRNLDFQALEETTEYDGGYTRDSVLIREFWEIVHSFTDEQKRLFLQFTTGTDRAPVGGLGKLKMIIAKNGPDTERLPTSHTCFNVLLLPEYSSKEKLKERLLKAITYAKGFGML

SEQ ID NO: 1040 - protein, 505 aa, synthetic construct
  source 1..505: note = HA-NLS-BC2-(GS)1-E6AP peptide
MYPYDVPDYAPAAKRVKLDGSGSGSQVQLVESGGGLVQPGGSLTLSCTASGFTLDHYDIGWFRQAPGKEREGVSCINNSDDDTYYADSVKGRFTIFMNNAKDTVYLQMNSLKPEDTAIYYCAEARGCKRGRYEYDFWGQGTQVTVSSGSNPYLRLKVRRDHIIDDALVRLEMIAMENPADLKKQLYVEFEGEQGVDEGGVSKEFFQLVVEEIFNPDIGMFTYDESTKLFWFNPSSFETEGQFTLIGIVLGLAIYNNCILDVHFPMVVYRKLMGKKGTFRDLGDSHPVLYQSLKDLLEYEGNVEDDMMITFQISQTDLFGNPMMYDLKENGDKIPITNENRKEFVNLYSDYILNKSVEKQFKAFRRGFHMVTNESPLKYLFRPEEIELLICGSRNLDFQALEETTEYDGGYTRDSVLIREFWEIVHSFTDEQKRLFLQFTTGTDRAPVGGLGKLKMIIAKNGPDTERLPTSHTCFNVLLLPEYSSKEKLKERLLKAITYAKGFGML

SEQ ID NO: 1041 - protein, 507 aa, synthetic construct
  source 1..507: note = HA-NLS-BC2-(GS)2-E6AP peptide
MYPYDVPDYAPAAKRVKLDGSGSGSQVQLVESGGGLVQPGGSLTLSCTASGFTLDHYDIGWFRQAPGKEREGVSCINNSDDDTYYADSVKGRFTIFMNNAKDTVYLQMNSLKPEDTAIYYCAEARGCKRGRYEYDFWGQGTQVTVSSGSGSNPYLRLKVRRDHIIDDALVRLEMIAMENPADLKKQLYVEFEGEQGVDEGGVSKEFFQLVVEEIFNPDIGMFTYDESTKLFWFNPSSFETEGQFTLIGIVLGLAIYNNCILDVHFPMVVYRKLMGKKGTFRDLGDSHPVLYQSLKDLLEYEGNVEDDMMITFQISQTDLFGNPMMYDLKENGDKIPITNENRKEFVNLYSDYILNKSVEKQFKAFRRGFHMVTNESPLKYLFRPEEIELLICGSRNLDFQALEETTEYDGGYTRDSVLIREFWEIVHSFTDEQKRLFLQFTTGTDRAPVGGLGKLKMIIAKNGPDTERLPTSHTCFNVLLLPEYSSKEKLKERLLKAITYAKGFGML

SEQ ID NO: 1042 - protein, 509 aa, synthetic construct
  source 1..509: note = HA-NLS-BC2(GS)3-E6AP peptide
MYPYDVPDYAPAAKRVKLDGSGSGSQVQLVESGGGLVQPGGSLTLSCTASGFTLDHYDIGWFRQAPGKEREGVSCINNSDDDTYYADSVKGRFTIFMNNAKDTVYLQMNSLKPEDTAIYYCAEARGCKRGRYEYDFWGQGTQVTVSSGSGSGSNPYLRLKVRRDHIIDDALVRLEMIAMENPADLKKQLYVEFEGEQGVDEGGVSKEFFQLVVEEIFNPDIGMFTYDESTKLFWFNPSSFETEGQFTLIGIVLGLAIYNNCILDVHFPMVVYRKLMGKKGTFRDLGDSHPVLYQSLKDLLEYEGNVEDDMMITFQISQTDLFGNPMMYDLKENGDKIPITNENRKEFVNLYSDYILNKSVEKQFKAFRRGFHMVTNESPLKYLFRPEEIELLICGSRNLDFQALEETTEYDGGYTRDSVLIREFWEIVHSFTDEQKRLFLQFTTGTDRAPVGGLGKLKMIIAKNGPDTERLPTSHTCFNVLLLPEYSSKEKLKERLLKAITYAKGFGML

SEQ ID NO: 1043 - protein, 511 aa, synthetic construct
  source 1..511: note = HA-NLS-BC2-(GS)4-E6AP peptide
MYPYDVPDYAPAAKRVKLDGSGSGSQVQLVESGGGLVQPGGSLTLSCTASGFTLDHYDIGWFRQAPGKEREGVSCINNSDDDTYYADSVKGRFTIFMNNAKDTVYLQMNSLKPEDTAIYYCAEARGCKRGRYEYDFWGQGTQVTVSSGSGSGSGSNPYLRLKVRRDHIIDDALVRLEMIAMENPADLKKQLYVEFEGEQGVDEGGVSKEFFQLVVEEIFNPDIGMFTYDESTKLFWFNPSSFETEGQFTLIGIVLGLAIYNNCILDVHFPMVVYRKLMGKKGTFRDLGDSHPVLYQSLKDLLEYEGNVEDDMMITFQISQTDLFGNPMMYDLKENGDKIPITNENRKEFVNLYSDYILNKSVEKQFKAFRRGFHMVTNESPLKYLFRPEEIELLICGSRNLDFQALEETTEYDGGYTRDSVLIREFWEIVHSFTDEQKRLFLQFTTGTDRAPVGGLGKLKMIIAKNGPDTERLPTSHTCFNVLLLPEYSSKEKLKERLLKAITYAKGFGML

SEQ ID NO: 1044 - protein, 513 aa, synthetic construct
  source 1..513: note = HA-NLS-BC2-(GS)5-E6AP peptide
MYPYDVPDYAPAAKRVKLDGSGSGSQVQLVESGGGLVQPGGSLTLSCTASGFTLDHYDIGWFRQAPGKEREGVSCINNSDDDTYYADSVKGRFTIFMNNAKDTVYLQMNSLKPEDTAIYYCAEARGCKRGRYEYDFWGQGTQVTVSSGSGSGSGSGSNPYLRLKVRRDHIIDDALVRLEMIAMENPADLKKQLYVEFEGEQGVDEGGVSKEFFQLVVEEIFNPDIGMFTYDESTKLFWFNPSSFETEGQFTLIGIVLGLAIYNNCILDVHFPMVVYRKLMGKKGTFRDLGDSHPVLYQSLKDLLEYEGNVEDDMMITFQISQTDLFGNPMMYDLKENGDKIPITNENRKEFVNLYSDYILNKSVEKQFKAFRRGFHMVTNESPLKYLFRPEEIELLICGSRNLDFQALEETTEYDGGYTRDSVLIREFWEIVHSFTDEQKRLFLQFTTGTDRAPVGGLGKLKMIIAKNGPDTERLPTSHTCFNVLLLPEYSSKEKLKERLLKAITYAKGFGML

SEQ ID NO: 1045 - protein, 515 aa, synthetic construct
  source 1..515: note = HA-NLS-BC2-(GS)6-E6AP peptide
MYPYDVPDYAPAAKRVKLDGSGSGSQVQLVESGGGLVQPGGSLTLSCTASGFTLDHYDIGWFRQAPGKEREGVSCINNSDDDTYYADSVKGRFTIFMNNAKDTVYLQMNSLKPEDTAIYYCAEARGCKRGRYEYDFWGQGTQVTVSSGSGSGSGSGSGSNPYLRLKVRRDHIIDDALVRLEMIAMENPADLKKQLYVEFEGEQGVDEGGVSKEFFQLVVEEIFNPDIGMFTYDESTKLFWFNPSSFETEGQFTLIGIVLGLAIYNNCILDVHFPMVVYRKLMGKKGTFRDLGDSHPVLYQSLKDLLEYEGNVEDDMMITFQISQTDLFGNPMMYDLKENGDKIPITNENRKEFVNLYSDYILNKSVEKQFKAFRRGFHMVTNESPLKYLFRPEEIELLICGSRNLDFQALEETTEYDGGYTRDSVLIREFWEIVHSFTDEQKRLFLQFTTGTDRAPVGGLGKLKMIIAKNGPDTERLPTSHTCFNVLLLPEYSSKEKLKERLLKAITYAKGFGML

SEQ ID NO: 1046 - protein, 491 aa, synthetic construct
  source 1..491: note = FBXW7a-(GS)1-BC2 peptide
NQELLSVGSKRRRTGGSLRGNPSSSQVDEEQMNRVVEEEQQQQLRQQEEEHTARNGEVVGVEPRPGGQNDSQQGQLEENNNRFISVDEDSSGNQEEQEEDEEHAGEQDEEDEEEEEMDQESDDFDQSDDSSREDEHTHTNSVTNSSSIVDLPVHQLSSPFYTKTTKMKRKLDHGSEVRSFSLGKKPCKVSEYTSTTGLVPCSATPTTFGDLRAANGQGQQRRRITSVQPPTGLQEWLKMFQSWSGPEKLLALDELIDSCEPTQVKHMMQVIEPQFQRDFISLLPKELALYVLSFLEPKDLLQAAQTCRYWRILAEDNLLWREKCKEEGIDEPLHIKRRKVIKPGFIHSPWKSAYIRQHRIDTNSRRGGSQVQLVESGGGLVQPGGSLTLSCTASGFTLDHYDIGWFRQAPGKEREGVSCINNSDDDTYYADSVKGRFTIFMNNAKDTVYLQMNSLKPEDTAIYYCAEARGCKRGRYEYDFWGQGTQVTVSS

SEQ ID NO: 1047 - protein, 493 aa, synthetic construct
  source 1..493: note = FBXW7a-(GS)2-BC2 peptide
NQELLSVGSKRRRTGGSLRGNPSSSQVDEEQMNRVVEEEQQQQLRQQEEEHTARNGEVVGVEPRPGGQNDSQQGQLEENNNRFISVDEDSSGNQEEQEEDEEHAGEQDEEDEEEEEMDQESDDFDQSDDSSREDEHTHTNSVTNSSSIVDLPVHQLSSPFYTKTTKMKRKLDHGSEVRSFSLGKKPCKVSEYTSTTGLVPCSATPTTFGDLRAANGQGQQRRRITSVQPPTGLQEWLKMFQSWSGPEKLLALDELIDSCEPTQVKHMMQVIEPQFQRDFISLLPKELALYVLSFLEPKDLLQAAQTCRYWRILAEDNLLWREKCKEEGIDEPLHIKRRKVIKPGFIHSPWKSAYIRQHRIDTNSRRGGSGSQVQLVESGGGLVQPGGSLTLSCTASGFTLDHYDIGWFRQAPGKEREGVSCINNSDDDTYYADSVKGRFTIFMNNAKDTVYLQMNSLKPEDTAIYYCAEARGCKRGRYEYDFWGQGTQVTVSS

SEQ ID NO: 1048 - protein, 495 aa, synthetic construct
  source 1..495: note = FBXW7a-(GS)3-BC2 peptide
NQELLSVGSKRRRTGGSLRGNPSSSQVDEEQMNRVVEEEQQQQLRQQEEEHTARNGEVVGVEPRPGGQNDSQQGQLEENNNRFISVDEDSSGNQEEQEEDEEHAGEQDEEDEEEEEMDQESDDFDQSDDSSREDEHTHTNSVTNSSSIVDLPVHQLSSPFYTKTTKMKRKLDHGSEVRSFSLGKKPCKVSEYTSTTGLVPCSATPTTFGDLRAANGQGQQRRRITSVQPPTGLQEWLKMFQSWSGPEKLLALDELIDSCEPTQVKHMMQVIEPQFQRDFISLLPKELALYVLSFLEPKDLLQAAQTCRYWRILAEDNLLWREKCKEEGIDEPLHIKRRKVIKPGFIHSPWKSAYIRQHRIDTNSRRGGSGSGSQVQLVESGGGLVQPGGSLTLSCTASGFTLDHYDIGWFRQAPGKEREGVSCINNSDDDTYYADSVKGRFTIFMNNAKDTVYLQMNSLKPEDTAIYYCAEARGCKRGRYEYDFWGQGTQVTVSS

SEQ ID NO: 1049 - protein, 497 aa, synthetic construct
  source 1..497: note = FBXW7a-(GS)4-BC2 peptide
NQELLSVGSKRRRTGGSLRGNPSSSQVDEEQMNRVVEEEQQQQLRQQEEEHTARNGEVVGVEPRPGGQNDSQQGQLEENNNRFISVDEDSSGNQEEQEEDEEHAGEQDEEDEEEEEMDQESDDFDQSDDSSREDEHTHTNSVTNSSSIVDLPVHQLSSPFYTKTTKMKRKLDHGSEVRSFSLGKKPCKVSEYTSTTGLVPCSATPTTFGDLRAANGQGQQRRRITSVQPPTGLQEWLKMFQSWSGPEKLLALDELIDSCEPTQVKHMMQVIEPQFQRDFISLLPKELALYVLSFLEPKDLLQAAQTCRYWRILAEDNLLWREKCKEEGIDEPLHIKRRKVIKPGFIHSPWKSAYIRQHRIDTNSRRGGSGSGSGSQVQLVESGGGLVQPGGSLTLSCTASGFTLDHYDIGWFRQAPGKEREGVSCINNSDDDTYYADSVKGRFTIFMNNAKDTVYLQMNSLKPEDTAIYYCAEARGCKRGRYEYDFWGQGTQVTVSS

SEQ ID NO: 1050 - protein, 499 aa, synthetic construct
  source 1..499: note = FBXW7a-(GS)5-BC2 peptide
NQELLSVGSKRRRTGGSLRGNPSSSQVDEEQMNRVVEEEQQQQLRQQEEEHTARNGEVVGVEPRPGGQNDSQQGQLEENNNRFISVDEDSSGNQEEQEEDEEHAGEQDEEDEEEEEMDQESDDFDQSDDSSREDEHTHTNSVTNSSSIVDLPVHQLSSPFYTKTTKMKRKLDHGSEVRSFSLGKKPCKVSEYTSTTGLVPCSATPTTFGDLRAANGQGQQRRRITSVQPPTGLQEWLKMFQSWSGPEKLLALDELIDSCEPTQVKHMMQVIEPQFQRDFISLLPKELALYVLSFLEPKDLLQAAQTCRYWRILAEDNLLWREKCKEEGIDEPLHIKRRKVIKPGFIHSPWKSAYIRQHRIDTNSRRGGSGSGSGSGSQVQLVESGGGLVQPGGSLTLSCTASGFTLDHYDIGWFRQAPGKEREGVSCINNSDDDTYYADSVKGRFTIFMNNAKDTVYLQMNSLKPEDTAIYYCAEARGCKRGRYEYDFWGQGTQVTVSS

SEQ ID NO: 1051 - protein, 501 aa, synthetic construct
  source 1..501: note = FBXW7a-(GS)6-BC2 peptide
NQELLSVGSKRRRTGGSLRGNPSSSQVDEEQMNRVVEEEQQQQLRQQEEEHTARNGEVVGVEPRPGGQNDSQQGQLEENNNRFISVDEDSSGNQEEQEEDEEHAGEQDEEDEEEEEMDQESDDFDQSDDSSREDEHTHTNSVTNSSSIVDLPVHQLSSPFYTKTTKMKRKLDHGSEVRSFSLGKKPCKVSEYTSTTGLVPCSATPTTFGDLRAANGQGQQRRRITSVQPPTGLQEWLKMFQSWSGPEKLLALDELIDSCEPTQVKHMMQVIEPQFQRDFISLLPKELALYVLSFLEPKDLLQAAQTCRYWRILAEDNLLWREKCKEEGIDEPLHIKRRKVIKPGFIHSPWKSAYIRQHRIDTNSRRGGSGSGSGSGSGSQVQLVESGGGLVQPGGSLTLSCTASGFTLDHYDIGWFRQAPGKEREGVSCINNSDDDTYYADSVKGRFTIFMNNAKDTVYLQMNSLKPEDTAIYYCAEARGCKRGRYEYDFWGQGTQVTVSS

SEQ ID NO: 1052 - protein, 501 aa, synthetic construct
  source 1..501: note = HA-FBXW7a-(GS)1-BC2 peptide
MYPYDVPDYANQELLSVGSKRRRTGGSLRGNPSSSQVDEEQMNRVVEEEQQQQLRQQEEEHTARNGEVVGVEPRPGGQNDSQQGQLEENNNRFISVDEDSSGNQEEQEEDEEHAGEQDEEDEEEEEMDQESDDFDQSDDSSREDEHTHTNSVTNSSSIVDLPVHQLSSPFYTKTTKMKRKLDHGSEVRSFSLGKKPCKVSEYTSTTGLVPCSATPTTFGDLRAANGQGQQRRRITSVQPPTGLQEWLKMFQSWSGPEKLLALDELIDSCEPTQVKHMMQVIEPQFQRDFISLLPKELALYVLSFLEPKDLLQAAQTCRYWRILAEDNLLWREKCKEEGIDEPLHIKRRKVIKPGFIHSPWKSAYIRQHRIDTNSRRGGSQVQLVESGGGLVQPGGSLTLSCTASGFTLDHYDIGWFRQAPGKEREGVSCINNSDDDTYYADSVKGRFTIFMNNAKDTVYLQMNSLKPEDTAIYYCAEARGCKRGRYEYDFWGQGTQVTVSS

SEQ ID NO: 1053 - protein, 503 aa, synthetic construct
  source 1..503: note = HA-FBXW7a-(GS)2-BC2 peptide
MYPYDVPDYANQELLSVGSKRRRTGGSLRGNPSSSQVDEEQMNRVVEEEQQQQLRQQEEEHTARNGEVVGVEPRPGGQNDSQQGQLEENNNRFISVDEDSSGNQEEQEEDEEHAGEQDEEDEEEEEMDQESDDFDQSDDSSREDEHTHTNSVTNSSSIVDLPVHQLSSPFYTKTTKMKRKLDHGSEVRSFSLGKKPCKVSEYTSTTGLVPCSATPTTFGDLRAANGQGQQRRRITSVQPPTGLQEWLKMFQSWSGPEKLLALDELIDSCEPTQVKHMMQVIEPQFQRDFISLLPKELALYVLSFLEPKDLLQAAQTCRYWRILAEDNLLWREKCKEEGIDEPLHIKRRKVIKPGFIHSPWKSAYIRQHRIDTNSRRGGSGSQVQLVESGGGLVQPGGSLTLSCTASGFTLDHYDIGWFRQAPGKEREGVSCINNSDDDTYYADSVKGRFTIFMNNAKDTVYLQMNSLKPEDTAIYYCAEARGCKRGRYEYDFWGQGTQVTVSS

SEQ ID NO: 1054 - protein, 505 aa, synthetic construct
  source 1..505: note = HA-FBXW7a-(GS)3-BC2 peptide
MYPYDVPDYANQELLSVGSKRRRTGGSLRGNPSSSQVDEEQMNRVVEEEQQQQLRQQEEEHTARNGEVVGVEPRPGGQNDSQQGQLEENNNRFISVDEDSSGNQEEQEEDEEHAGEQDEEDEEEEEMDQESDDFDQSDDSSREDEHTHTNSVTNSSSIVDLPVHQLSSPFYTKTTKMKRKLDHGSEVRSFSLGKKPCKVSEYTSTTGLVPCSATPTTFGDLRAANGQGQQRRRITSVQPPTGLQEWLKMFQSWSGPEKLLALDELIDSCEPTQVKHMMQVIEPQFQRDFISLLPKELALYVLSFLEPKDLLQAAQTCRYWRILAEDNLLWREKCKEEGIDEPLHIKRRKVIKPGFIHSPWKSAYIRQHRIDTNSRRGGSGSGSQVQLVESGGGLVQPGGSLTLSCTASGFTLDHYDIGWFRQAPGKEREGVSCINNSDDDTYYADSVKGRFTIFMNNAKDTVYLQMNSLKPEDTAIYYCAEARGCKRGRYEYDFWGQGTQVTVSS

SEQ ID NO: 1055 - protein, 507 aa, synthetic construct
  source 1..507: note = HA-FBXW7a-(GS)4-BC2 peptide
MYPYDVPDYANQELLSVGSKRRRTGGSLRGNPSSSQVDEEQMNRVVEEEQQQQLRQQEEEHTARNGEVVGVEPRPGGQNDSQQGQLEENNNRFISVDEDSSGNQEEQEEDEEHAGEQDEEDEEEEEMDQESDDFDQSDDSSREDEHTHTNSVTNSSSIVDLPVHQLSSPFYTKTTKMKRKLDHGSEVRSFSLGKKPCKVSEYTSTTGLVPCSATPTTFGDLRAANGQGQQRRRITSVQPPTGLQEWLKMFQSWSGPEKLLALDELIDSCEPTQVKHMMQVIEPQFQRDFISLLPKELALYVLSFLEPKDLLQAAQTCRYWRILAEDNLLWREKCKEEGIDEPLHIKRRKVIKPGFIHSPWKSAYIRQHRIDTNSRRGGSGSGSGSQVQLVESGGGLVQPGGSLTLSCTASGFTLDHYDIGWFRQAPGKEREGVSCINNSDDDTYYADSVKGRFTIFMNNAKDTVYLQMNSLKPEDTAIYYCAEARGCKRGRYEYDFWGQGTQVTVSS

SEQ ID NO: 1056 - protein, 509 aa, synthetic construct
  source 1..509: note = HA-FBXW7a-(GS)5-BC2 peptide
MYPYDVPDYANQELLSVGSKRRRTGGSLRGNPSSSQVDEEQMNRVVEEEQQQQLRQQEEEHTARNGEVVGVEPRPGGQNDSQQGQLEENNNRFISVDEDSSGNQEEQEEDEEHAGEQDEEDEEEEEMDQESDDFDQSDDSSREDEHTHTNSVTNSSSIVDLPVHQLSSPFYTKTTKMKRKLDHGSEVRSFSLGKKPCKVSEYTSTTGLVPCSATPTTFGDLRAANGQGQQRRRITSVQPPTGLQEWLKMFQSWSGPEKLLALDELIDSCEPTQVKHMMQVIEPQFQRDFISLLPKELALYVLSFLEPKDLLQAAQTCRYWRILAEDNLLWREKCKEEGIDEPLHIKRRKVIKPGFIHSPWKSAYIRQHRIDTNSRRGGSGSGSGSGSQVQLVESGGGLVQPGGSLTLSCTASGFTLDHYDIGWFRQAPGKEREGVSCINNSDDDTYYADSVKGRFTIFMNNAKDTVYLQMNSLKPEDTAIYYCAEARGCKRGRYEYDFWGQGTQVTVSS

SEQ ID NO: 1057 - protein, 511 aa, synthetic construct
  source 1..511: note = HA-FBXW7a-(GS)6-BC2 peptide
MYPYDVPDYANQELLSVGSKRRRTGGSLRGNPSSSQVDEEQMNRVVEEEQQQQLRQQEEEHTARNGEVVGVEPRPGGQNDSQQGQLEENNNRFISVDEDSSGNQEEQEEDEEHAGEQDEEDEEEEEMDQESDDFDQSDDSSREDEHTHTNSVTNSSSIVDLPVHQLSSPFYTKTTKMKRKLDHGSEVRSFSLGKKPCKVSEYTSTTGLVPCSATPTTFGDLRAANGQGQQRRRITSVQPPTGLQEWLKMFQSWSGPEKLLALDELIDSCEPTQVKHMMQVIEPQFQRDFISLLPKELALYVLSFLEPKDLLQAAQTCRYWRILAEDNLLWREKCKEEGIDEPLHIKRRKVIKPGFIHSPWKSAYIRQHRIDTNSRRGGSGSGSGSGSGSQVQLVESGGGLVQPGGSLTLSCTASGFTLDHYDIGWFRQAPGKEREGVSCINNSDDDTYYADSVKGRFTIFMNNAKDTVYLQMNSLKPEDTAIYYCAEARGCKRGRYEYDFWGQGTQVTVSS

SEQ ID NO: 1058 - protein, 460 aa, synthetic construct
  source 1..460: note = NLS-Keap1-(GS)1-BC2 peptide
PAAKRVKLDGSGSGSQPDPRPSGAGACCRFLPLQSQCPEGAGDAVMYASTECKAEVTPSQHGNRTFSYTLEDHTKQAFGIMNELRLSQQLCDVTLQVKYQDAPAAQFMAHKVVLASSSPVFKAMFTNGLREQGMEVVSIEGIHPKVMERLIEFAYTASISMGEKCVLHVMNGAVMYQIDSVVRACSDFLVQQLDPSNAIGIANFAEQIGCVELHQRAREYIYMHFGEVAKQEEFFNLSHCQLVTLISRDDLNVRCESEVFHACINWVKYDCEQRRFYVQALLRAVRCHSLTPNFLQMQLQKCEILQSDSRCKDYLVKIFEELTLHKPTQVMPCRAPGSQVQLVESGGGLVQPGGSLTLSCTASGFTLDHYDIGWFRQAPGKEREGVSCINNSDDDTYYADSVKGRFTIFMNNAKDTVYLQMNSLKPEDTAIYYCAEARGCKRGRYEYDFWGQGTQVTVSS

SEQ ID NO: 1059 - protein, 462 aa, synthetic construct
  source 1..462: note = NLS-Keap1-(GS)2-BC2 peptide
PAAKRVKLDGSGSGSQPDPRPSGAGACCRFLPLQSQCPEGAGDAVMYASTECKAEVTPSQHGNRTFSYTLEDHTKQAFGIMNELRLSQQLCDVTLQVKYQDAPAAQFMAHKVVLASSSPVFKAMFTNGLREQGMEVVSIEGIHPKVMERLIEFAYTASISMGEKCVLHVMNGAVMYQIDSVVRACSDFLVQQLDPSNAIGIANFAEQIGCVELHQRAREYIYMHFGEVAKQEEFFNLSHCQLVTLISRDDLNVRCESEVFHACINWVKYDCEQRRFYVQALLRAVRCHSLTPNFLQMQLQKCEILQSDSRCKDYLVKIFEELTLHKPTQVMPCRAPGSGSQVQLVESGGGLVQPGGSLTLSCTASGFTLDHYDIGWFRQAPGKEREGVSCINNSDDDTYYADSVKGRFTIFMNNAKDTVYLQMNSLKPEDTAIYYCAEARGCKRGRYEYDFWGQGTQVTVSS

SEQ ID NO: 1060 - protein, 464 aa, synthetic construct
  source 1..464: note = NLS-Keap1-(GS)3-BC2 peptide
PAAKRVKLDGSGSGSQPDPRPSGAGACCRFLPLQSQCPEGAGDAVMYASTECKAEVTPSQHGNRTFSYTLEDHTKQAFGIMNELRLSQQLCDVTLQVKYQDAPAAQFMAHKVVLASSSPVFKAMFTNGLREQGMEVVSIEGIHPKVMERLIEFAYTASISMGEKCVLHVMNGAVMYQIDSVVRACSDFLVQQLDPSNAIGIANFAEQIGCVELHQRAREYIYMHFGEVAKQEEFFNLSHCQLVTLISRDDLNVRCESEVFHACINWVKYDCEQRRFYVQALLRAVRCHSLTPNFLQMQLQKCEILQSDSRCKDYLVKIFEELTLHKPTQVMPCRAPGSGSGSQVQLVESGGGLVQPGGSLTLSCTASGFTLDHYDIGWFRQAPGKEREGVSCINNSDDDTYYADSVKGRFTIFMNNAKDTVYLQMNSLKPEDTAIYYCAEARGCKRGRYEYDFWGQGTQVTVSS

SEQ ID NO: 1061 - protein, 466 aa, synthetic construct
  source 1..466: note = NLS-Keap1-(GS)4-BC2 peptide
PAAKRVKLDGSGSGSQPDPRPSGAGACCRFLPLQSQCPEGAGDAVMYASTECKAEVTPSQHGNRTFSYTLEDHTKQAFGIMNELRLSQQLCDVTLQVKYQDAPAAQFMAHKVVLASSSPVFKAMFTNGLREQGMEVVSIEGIHPKVMERLIEFAYTASISMGEKCVLHVMNGAVMYQIDSVVRACSDFLVQQLDPSNAIGIANFAEQIGCVELHQRAREYIYMHFGEVAKQEEFFNLSHCQLVTLISRDDLNVRCESEVFHACINWVKYDCEQRRFYVQALLRAVRCHSLTPNFLQMQLQKCEILQSDSRCKDYLVKIFEELTLHKPTQVMPCRAPGSGSGSGSQVQLVESGGGLVQPGGSLTLSCTASGFTLDHYDIGWFRQAPGKEREGVSCINNSDDDTYYADSVKGRFTIFMNNAKDTVYLQMNSLKPEDTAIYYCAEARGCKRGRYEYDFWGQGTQVTVSS

SEQ ID NO: 1062 - protein, 468 aa, synthetic construct
  source 1..468: note = NLS-Keap1-(GS)5-BC2 peptide
PAAKRVKLDGSGSGSQPDPRPSGAGACCRFLPLQSQCPEGAGDAVMYASTECKAEVTPSQHGNRTFSYTLEDHTKQAFGIMNELRLSQQLCDVTLQVKYQDAPAAQFMAHKVVLASSSPVFKAMFTNGLREQGMEVVSIEGIHPKVMERLIEFAYTASISMGEKCVLHVMNGAVMYQIDSVVRACSDFLVQQLDPSNAIGIANFAEQIGCVELHQRAREYIYMHFGEVAKQEEFFNLSHCQLVTLISRDDLNVRCESEVFHACINWVKYDCEQRRFYVQALLRAVRCHSLTPNFLQMQLQKCEILQSDSRCKDYLVKIFEELTLHKPTQVMPCRAPGSGSGSGSGSQVQLVESGGGLVQPGGSLTLSCTASGFTLDHYDIGWFRQAPGKEREGVSCINNSDDDTYYADSVKGRFTIFMNNAKDTVYLQMNSLKPEDTAIYYCAEARGCKRGRYEYDFWGQGTQVTVSS

SEQ ID NO: 1063 - protein, 470 aa, synthetic construct
  source 1..470: note = NLS-Keap1-(GS)6-BC2 peptide
PAAKRVKLDGSGSGSQPDPRPSGAGACCRFLPLQSQCPEGAGDAVMYASTECKAEVTPSQHGNRTFSYTLEDHTKQAFGIMNELRLSQQLCDVTLQVKYQDAPAAQFMAHKVVLASSSPVFKAMFTNGLREQGMEVVSIEGIHPKVMERLIEFAYTASISMGEKCVLHVMNGAVMYQIDSVVRACSDFLVQQLDPSNAIGIANFAEQIGCVELHQRAREYIYMHFGEVAKQEEFFNLSHCQLVTLISRDDLNVRCESEVFHACINWVKYDCEQRRFYVQALLRAVRCHSLTPNFLQMQLQKCEILQSDSRCKDYLVKIFEELTLHKPTQVMPCRAPGSGSGSGSGSGSQVQLVESGGGLVQPGGSLTLSCTASGFTLDHYDIGWFRQAPGKEREGVSCINNSDDDTYYADSVKGRFTIFMNNAKDTVYLQMNSLKPEDTAIYYCAEARGCKRGRYEYDFWGQGTQVTVSS

SEQ ID NO: 1064 - protein, 470 aa, synthetic construct
  source 1..470: note = HA-NLS-Keap1-(GS)1-BC2 peptide
MYPYDVPDYAPAAKRVKLDGSGSGSQPDPRPSGAGACCRFLPLQSQCPEGAGDAVMYASTECKAEVTPSQHGNRTFSYTLEDHTKQAFGIMNELRLSQQLCDVTLQVKYQDAPAAQFMAHKVVLASSSPVFKAMFTNGLREQGMEVVSIEGIHPKVMERLIEFAYTASISMGEKCVLHVMNGAVMYQIDSVVRACSDFLVQQLDPSNAIGIANFAEQIGCVELHQRAREYIYMHFGEVAKQEEFFNLSHCQLVTLISRDDLNVRCESEVFHACINWVKYDCEQRRFYVQALLRAVRCHSLTPNFLQMQLQKCEILQSDSRCKDYLVKIFEELTLHKPTQVMPCRAPGSQVQLVESGGGLVQPGGSLTLSCTASGFTLDHYDIGWFRQAPGKEREGVSCINNSDDDTYYADSVKGRFTIFMNNAKDTVYLQMNSLKPEDTAIYYCAEARGCKRGRYEYDFWGQGTQVTVSS

SEQ ID NO: 1065 - protein, 472 aa, synthetic construct
  source 1..472: note = HA-NLS-Keap1-(GS)2-BC2 peptide
MYPYDVPDYAPAAKRVKLDGSGSGSQPDPRPSGAGACCRFLPLQSQCPEGAGDAVMYASTECKAEVTPSQHGNRTFSYTLEDHTKQAFGIMNELRLSQQLCDVTLQVKYQDAPAAQFMAHKVVLASSSPVFKAMFTNGLREQGMEVVSIEGIHPKVMERLIEFAYTASISMGEKCVLHVMNGAVMYQIDSVVRACSDFLVQQLDPSNAIGIANFAEQIGCVELHQRAREYIYMHFGEVAKQEEFFNLSHCQLVTLISRDDLNVRCESEVFHACINWVKYDCEQRRFYVQALLRAVRCHSLTPNFLQMQLQKCEILQSDSRCKDYLVKIFEELTLHKPTQVMPCRAPGSGSQVQLVESGGGLVQPGGSLTLSCTASGFTLDHYDIGWFRQAPGKEREGVSCINNSDDDTYYADSVKGRFTIFMNNAKDTVYLQMNSLKPEDTAIYYCAEARGCKRGRYEYDFWGQGTQVTVSS

SEQ ID NO: 1066 - protein, 474 aa, synthetic construct
  source 1..474: note = HA-NLS-Keap1-(GS)3-BC2 peptide
MYPYDVPDYAPAAKRVKLDGSGSGSQPDPRPSGAGACCRFLPLQSQCPEGAGDAVMYASTECKAEVTPSQHGNRTFSYTLEDHTKQAFGIMNELRLSQQLCDVTLQVKYQDAPAAQFMAHKVVLASSSPVFKAMFTNGLREQGMEVVSIEGIHPKVMERLIEFAYTASISMGEKCVLHVMNGAVMYQIDSVVRACSDFLVQQLDPSNAIGIANFAEQIGCVELHQRAREYIYMHFGEVAKQEEFFNLSHCQLVTLISRDDLNVRCESEVFHACINWVKYDCEQRRFYVQALLRAVRCHSLTPNFLQMQLQKCEILQSDSRCKDYLVKIFEELTLHKPTQVMPCRAPGSGSGSQVQLVESGGGLVQPGGSLTLSCTASGFTLDHYDIGWFRQAPGKEREGVSCINNSDDDTYYADSVKGRFTIFMNNAKDTVYLQMNSLKPEDTAIYYCAEARGCKRGRYEYDFWGQGTQVTVSS

SEQ ID NO: 1067 - protein, 476 aa, synthetic construct
  source 1..476: note = HA-NLS-Keap1-(GS)4-BC2 peptide
MYPYDVPDYAPAAKRVKLDGSGSGSQPDPRPSGAGACCRFLPLQSQCPEGAGDAVMYASTECKAEVTPSQHGNRTFSYTLEDHTKQAFGIMNELRLSQQLCDVTLQVKYQDAPAAQFMAHKVVLASSSPVFKAMFTNGLREQGMEVVSIEGIHPKVMERLIEFAYTASISMGEKCVLHVMNGAVMYQIDSVVRACSDFLVQQLDPSNAIGIANFAEQIGCVELHQRAREYIYMHFGEVAKQEEFFNLSHCQLVTLISRDDLNVRCESEVFHACINWVKYDCEQRRFYVQALLRAVRCHSLTPNFLQMQLQKCEILQSDSRCKDYLVKIFEELTLHKPTQVMPCRAPGSGSGSGSQVQLVESGGGLVQPGGSLTLSCTASGFTLDHYDIGWFRQAPGKEREGVSCINNSDDDTYYADSVKGRFTIFMNNAKDTVYLQMNSLKPEDTAIYYCAEARGCKRGRYEYDFWGQGTQVTVSS

SEQ ID NO: 1068 - protein, 478 aa, synthetic construct
  source 1..478: note = HA-NLS-Keap1-(GS)5-BC2 peptide
MYPYDVPDYAPAAKRVKLDGSGSGSQPDPRPSGAGACCRFLPLQSQCPEGAGDAVMYASTECKAEVTPSQHGNRTFSYTLEDHTKQAFGIMNELRLSQQLCDVTLQVKYQDAPAAQFMAHKVVLASSSPVFKAMFTNGLREQGMEVVSIEGIHPKVMERLIEFAYTASISMGEKCVLHVMNGAVMYQIDSVVRACSDFLVQQLDPSNAIGIANFAEQIGCVELHQRAREYIYMHFGEVAKQEEFFNLSHCQLVTLISRDDLNVRCESEVFHACINWVKYDCEQRRFYVQALLRAVRCHSLTPNFLQMQLQKCEILQSDSRCKDYLVKIFEELTLHKPTQVMPCRAPGSGSGSGSGSQVQLVESGGGLVQPGGSLTLSCTASGFTLDHYDIGWFRQAPGKEREGVSCINNSDDDTYYADSVKGRFTIFMNNAKDTVYLQMNSLKPEDTAIYYCAEARGCKRGRYEYDFWGQGTQVTVSS

SEQ ID NO: 1069 - protein, 480 aa, synthetic construct
  source 1..480: note = HA-NLS-Keap1-(GS)6-BC2 peptide
MYPYDVPDYAPAAKRVKLDGSGSGSQPDPRPSGAGACCRFLPLQSQCPEGAGDAVMYASTECKAEVTPSQHGNRTFSYTLEDHTKQAFGIMNELRLSQQLCDVTLQVKYQDAPAAQFMAHKVVLASSSPVFKAMFTNGLREQGMEVVSIEGIHPKVMERLIEFAYTASISMGEKCVLHVMNGAVMYQIDSVVRACSDFLVQQLDPSNAIGIANFAEQIGCVELHQRAREYIYMHFGEVAKQEEFFNLSHCQLVTLISRDDLNVRCESEVFHACINWVKYDCEQRRFYVQALLRAVRCHSLTPNFLQMQLQKCEILQSDSRCKDYLVKIFEELTLHKPTQVMPCRAPGSGSGSGSGSGSQVQLVESGGGLVQPGGSLTLSCTASGFTLDHYDIGWFRQAPGKEREGVSCINNSDDDTYYADSVKGRFTIFMNNAKDTVYLQMNSLKPEDTAIYYCAEARGCKRGRYEYDFWGQGTQVTVSS

SEQ ID NO: 1070 - protein, 266 aa, synthetic construct
  source 1..266: note = NLS-RNF125-(GS)1-BC2 peptide
PAAKRVKLDGSGSGSGSVLSTDSGKSAPASATARALERRRDPELPVTSFDCAVCLEVLHQPVRTRCGHVFCRSCIATSLKNNKWTCPYCRAYLPSEGVPATDVAKRMKSEYKNCAECDTLVCLSEMRAHIRTCQKYIDKYGPGSQVQLVESGGGLVQPGGSLTLSCTASGFTLDHYDIGWFRQAPGKEREGVSCINNSDDDTYYADSVKGRFTIFMNNAKDTVYLQMNSLKPEDTAIYYCAEARGCKRGRYEYDFWGQGTQVTVSS

SEQ ID NO: 1071 - protein, 268 aa, synthetic construct
  source 1..268: note = NLS-RNF125-(GS)2-BC2 peptide
PAAKRVKLDGSGSGSGSVLSTDSGKSAPASATARALERRRDPELPVTSFDCAVCLEVLHQPVRTRCGHVFCRSCIATSLKNNKWTCPYCRAYLPSEGVPATDVAKRMKSEYKNCAECDTLVCLSEMRAHIRTCQKYIDKYGPGSGSQVQLVESGGGLVQPGGSLTLSCTASGFTLDHYDIGWFRQAPGKEREGVSCINNSDDDTYYADSVKGRFTIFMNNAKDTVYLQMNSLKPEDTAIYYCAEARGCKRGRYEYDFWGQGTQVTVSS

SEQ ID NO: 1072 - protein, 270 aa, synthetic construct
  source 1..270: note = NLS-RNF125-(GS)3-BC2 peptide
PAAKRVKLDGSGSGSGSVLSTDSGKSAPASATARALERRRDPELPVTSFDCAVCLEVLHQPVRTRCGHVFCRSCIATSLKNNKWTCPYCRAYLPSEGVPATDVAKRMKSEYKNCAECDTLVCLSEMRAHIRTCQKYIDKYGPGSGSGSQVQLVESGGGLVQPGGSLTLSCTASGFTLDHYDIGWFRQAPGKEREGVSCINNSDDDTYYADSVKGRFTIFMNNAKDTVYLQMNSLKPEDTAIYYCAEARGCKRGRYEYDFWGQGTQVTVSS

SEQ ID NO: 1073 - protein, 272 aa, synthetic construct
  source 1..272: note = NLS-RNF125-(GS)4-BC2 peptide
PAAKRVKLDGSGSGSGSVLSTDSGKSAPASATARALERRRDPELPVTSFDCAVCLEVLHQPVRTRCGHVFCRSCIATSLKNNKWTCPYCRAYLPSEGVPATDVAKRMKSEYKNCAECDTLVCLSEMRAHIRTCQKYIDKYGPGSGSGSGSQVQLVESGGGLVQPGGSLTLSCTASGFTLDHYDIGWFRQAPGKEREGVSCINNSDDDTYYADSVKGRFTIFMNNAKDTVYLQMNSLKPEDTAIYYCAEARGCKRGRYEYDFWGQGTQVTVSS

SEQ ID NO: 1074 - protein, 274 aa, synthetic construct
  source 1..274: note = NLS-RNF125-(GS)5-BC2 peptide
PAAKRVKLDGSGSGSGSVLSTDSGKSAPASATARALERRRDPELPVTSFDCAVCLEVLHQPVRTRCGHVFCRSCIATSLKNNKWTCPYCRAYLPSEGVPATDVAKRMKSEYKNCAECDTLVCLSEMRAHIRTCQKYIDKYGPGSGSGSGSGSQVQLVESGGGLVQPGGSLTLSCTASGFTLDHYDIGWFRQAPGKEREGVSCINNSDDDTYYADSVKGRFTIFMNNAKDTVYLQMNSLKPEDTAIYYCAEARGCKRGRYEYDFWGQGTQVTVSS

SEQ ID NO: 1075 - protein, 276 aa, synthetic construct
  source 1..276: note = NLS-RNF125-(GS)6-BC2 peptide
PAAKRVKLDGSGSGSGSVLSTDSGKSAPASATARALERRRDPELPVTSFDCAVCLEVLHQPVRTRCGHVFCRSCIATSLKNNKWTCPYCRAYLPSEGVPATDVAKRMKSEYKNCAECDTLVCLSEMRAHIRTCQKYIDKYGPGSGSGSGSGSGSQVQLVESGGGLVQPGGSLTLSCTASGFTLDHYDIGWFRQAPGKEREGVSCINNSDDDTYYADSVKGRFTIFMNNAKDTVYLQMNSLKPEDTAIYYCAEARGCKRGRYEYDFWGQGTQVTVSS

SEQ ID NO: 1076 - protein, 276 aa, synthetic construct
  source 1..276: note = HA-NLS-RNF125-(GS)1-BC2 peptide
MYPYDVPDYAPAAKRVKLDGSGSGSGSVLSTDSGKSAPASATARALERRRDPELPVTSFDCAVCLEVLHQPVRTRCGHVFCRSCIATSLKNNKWTCPYCRAYLPSEGVPATDVAKRMKSEYKNCAECDTLVCLSEMRAHIRTCQKYIDKYGPGSQVQLVESGGGLVQPGGSLTLSCTASGFTLDHYDIGWFRQAPGKEREGVSCINNSDDDTYYADSVKGRFTIFMNNAKDTVYLQMNSLKPEDTAIYYCAEARGCKRGRYEYDFWGQGTQVTVSS

SEQ ID NO: 1077 - protein, 278 aa, synthetic construct
  source 1..278: note = HA-NLS-RNF125-(GS)2-BC2 peptide
MYPYDVPDYAPAAKRVKLDGSGSGSGSVLSTDSGKSAPASATARALERRRDPELPVTSFDCAVCLEVLHQPVRTRCGHVFCRSCIATSLKNNKWTCPYCRAYLPSEGVPATDVAKRMKSEYKNCAECDTLVCLSEMRAHIRTCQKYIDKYGPGSGSQVQLVESGGGLVQPGGSLTLSCTASGFTLDHYDIGWFRQAPGKEREGVSCINNSDDDTYYADSVKGRFTIFMNNAKDTVYLQMNSLKPEDTAIYYCAEARGCKRGRYEYDFWGQGTQVTVSS

SEQ ID NO: 1078 - protein, 280 aa, synthetic construct
  source 1..280: note = HA-NLS-RNF125-(GS)3-BC2 peptide
MYPYDVPDYAPAAKRVKLDGSGSGSGSVLSTDSGKSAPASATARALERRRDPELPVTSFDCAVCLEVLHQPVRTRCGHVFCRSCIATSLKNNKWTCPYCRAYLPSEGVPATDVAKRMKSEYKNCAECDTLVCLSEMRAHIRTCQKYIDKYGPGSGSGSQVQLVESGGGLVQPGGSLTLSCTASGFTLDHYDIGWFRQAPGKEREGVSCINNSDDDTYYADSVKGRFTIFMNNAKDTVYLQMNSLKPEDTAIYYCAEARGCKRGRYEYDFWGQGTQVTVSS

SEQ ID NO: 1079 - protein, 282 aa, synthetic construct
  source 1..282: note = HA-NLS-RNF125-(GS)4-BC2 peptide
MYPYDVPDYAPAAKRVKLDGSGSGSGSVLSTDSGKSAPASATARALERRRDPELPVTSFDCAVCLEVLHQPVRTRCGHVFCRSCIATSLKNNKWTCPYCRAYLPSEGVPATDVAKRMKSEYKNCAECDTLVCLSEMRAHIRTCQKYIDKYGPGSGSGSGSQVQLVESGGGLVQPGGSLTLSCTASGFTLDHYDIGWFRQAPGKEREGVSCINNSDDDTYYADSVKGRFTIFMNNAKDTVYLQMNSLKPEDTAIYYCAEARGCKRGRYEYDFWGQGTQVTVSS

SEQ ID NO: 1080 - protein, 284 aa, synthetic construct
  source 1..284: note = HA-NLS-RNF125-(GS)5-BC2 peptide
MYPYDVPDYAPAAKRVKLDGSGSGSGSVLSTDSGKSAPASATARALERRRDPELPVTSFDCAVCLEVLHQPVRTRCGHVFCRSCIATSLKNNKWTCPYCRAYLPSEGVPATDVAKRMKSEYKNCAECDTLVCLSEMRAHIRTCQKYIDKYGPGSGSGSGSGSQVQLVESGGGLVQPGGSLTLSCTASGFTLDHYDIGWFRQAPGKEREGVSCINNSDDDTYYADSVKGRFTIFMNNAKDTVYLQMNSLKPEDTAIYYCAEARGCKRGRYEYDFWGQGTQVTVSS

SEQ ID NO: 1081 - protein, 286 aa, synthetic construct
  source 1..286: note = HA-NLS-RNF125-(GS)6-BC2 peptide
MYPYDVPDYAPAAKRVKLDGSGSGSGSVLSTDSGKSAPASATARALERRRDPELPVTSFDCAVCLEVLHQPVRTRCGHVFCRSCIATSLKNNKWTCPYCRAYLPSEGVPATDVAKRMKSEYKNCAECDTLVCLSEMRAHIRTCQKYIDKYGPGSGSGSGSGSGSQVQLVESGGGLVQPGGSLTLSCTASGFTLDHYDIGWFRQAPGKEREGVSCINNSDDDTYYADSVKGRFTIFMNNAKDTVYLQMNSLKPEDTAIYYCAEARGCKRGRYEYDFWGQGTQVTVSS

SEQ ID NO: 1082 - protein, 366 aa, synthetic construct
  source 1..366: note = BC2-(GS)1-SPOP-NLS peptide
MQVQLVESGGGLVQPGGSLTLSCTASGFTLDHYDIGWFRQAPGKEREGVSCINNSDDDTYYADSVKGRFTIFMNNAKDTVYLQMNSLKPEDTAIYYCAEARGCKRGRYEYDFWGQGTQVTVSSGSNGLLPDDKLTLFCEVSVVQDSVNISGQNTMNMVKVPECRLADELGGLWENSRFTDCCLCVAGQEFQAHKAILAARSPVFSAMFEHEMEESKKNRVEINDVEPEVFKEMMCFIYTGKAPNLDKMADDLLAAADKYALERLKVMCEDALCSNLSVENAAEILILADLHSADQLKTQAVDFINYHASDVLETSGWKSMVVSHPHLVAEAYRSLASAQCPFLGPPRKRLKQSGSGSPAAKRVKLD

SEQ ID NO: 1083 - protein, 368 aa, synthetic construct
  source 1..368: note = BC2-(GS)2-SPOP-NLS peptide
MQVQLVESGGGLVQPGGSLTLSCTASGFTLDHYDIGWFRQAPGKEREGVSCINNSDDDTYYADSVKGRFTIFMNNAKDTVYLQMNSLKPEDTAIYYCAEARGCKRGRYEYDFWGQGTQVTVSSGSGSNGLLPDDKLTLFCEVSVVQDSVNISGQNTMNMVKVPECRLADELGGLWENSRFTDCCLCVAGQEFQAHKAILAARSPVFSAMFEHEMEESKKNRVEINDVEPEVFKEMMCFIYTGKAPNLDKMADDLLAAADKYALERLKVMCEDALCSNLSVENAAEILILADLHSADQLKTQAVDFINYHASDVLETSGWKSMVVSHPHLVAEAYRSLASAQCPFLGPPRKRLKQSGSGSPAAKRVKLD

SEQ ID NO: 1084 - protein, 370 aa, synthetic construct
  source 1..370: note = BC2-(GS)3-SPOP-NLS peptide
MQVQLVESGGGLVQPGGSLTLSCTASGFTLDHYDIGWFRQAPGKEREGVSCINNSDDDTYYADSVKGRFTIFMNNAKDTVYLQMNSLKPEDTAIYYCAEARGCKRGRYEYDFWGQGTQVTVSSGSGSGSNGLLPDDKLTLFCEVSVVQDSVNISGQNTMNMVKVPECRLADELGGLWENSRFTDCCLCVAGQEFQAHKAILAARSPVFSAMFEHEMEESKKNRVEINDVEPEVFKEMMCFIYTGKAPNLDKMADDLLAAADKYALERLKVMCEDALCSNLSVENAAEILILADLHSADQLKTQAVDFINYHASDVLETSGWKSMVVSHPHLVAEAYRSLASAQCPFLGPPRKRLKQSGSGSPAAKRVKLD

SEQ ID NO: 1085 - protein, 372 aa, synthetic construct
  source 1..372: note = BC2-(GS)4-SPOP-NLS peptide
MQVQLVESGGGLVQPGGSLTLSCTASGFTLDHYDIGWFRQAPGKEREGVSCINNSDDDTYYADSVKGRFTIFMNNAKDTVYLQMNSLKPEDTAIYYCAEARGCKRGRYEYDFWGQGTQVTVSSGSGSGSGSNGLLPDDKLTLFCEVSVVQDSVNISGQNTMNMVKVPECRLADELGGLWENSRFTDCCLCVAGQEFQAHKAILAARSPVFSAMFEHEMEESKKNRVEINDVEPEVFKEMMCFIYTGKAPNLDKMADDLLAAADKYALERLKVMCEDALCSNLSVENAAEILILADLHSADQLKTQAVDFINYHASDVLETSGWKSMVVSHPHLVAEAYRSLASAQCPFLGPPRKRLKQSGSGSPAAKRVKLD

SEQ ID NO: 1086 - protein, 375 aa, synthetic construct
  source 1..375: note = BC2-(GS)5-SPOP-NLS peptide
MQVQLVESGGGLVQPGGSLTLSCTASGFTLDHYDIGWFRQAPGKEREGVSCINNSDDDTYYADSVKGRFTIFMNNAKDTVYLQMNSLKPEDTAIYYCAEARGCKRGRYEYDFWGQGTQVTVSSGSGSGSGSGSNGLLPDDKLTLFCEVSVVQDSVNISGQNTMNMVKVPECRLADELGGLWENSRFTDCCLCVAGQEFQAHKAILAARSPVFSAMFEHEMEESKKNRVEINDVEPEVFKEMMCFIYTGKAPNLDKMADDLLAAADKYALERLKVMCEDALCSNLSVENAAEILILADLHSADQLKTQAVDFINYHASDVLETSGWKSMVVSHPHLVAEAYRSLASAQCPFLGPPRKRLKQSGSGSPAAKRVKLDA

SEQ ID NO: 1087 - protein, 376 aa, synthetic construct
  source 1..376: note = BC2-(GS)6-SPOP-NLS peptide
MQVQLVESGGGLVQPGGSLTLSCTASGFTLDHYDIGWFRQAPGKEREGVSCINNSDDDTYYADSVKGRFTIFMNNAKDTVYLQMNSLKPEDTAIYYCAEARGCKRGRYEYDFWGQGTQVTVSSGSGSGSGSGSGSNGLLPDDKLTLFCEVSVVQDSVNISGQNTMNMVKVPECRLADELGGLWENSRFTDCCLCVAGQEFQAHKAILAARSPVFSAMFEHEMEESKKNRVEINDVEPEVFKEMMCFIYTGKAPNLDKMADDLLAAADKYALERLKVMCEDALCSNLSVENAAEILILADLHSADQLKTQAVDFINYHASDVLETSGWKSMVVSHPHLVAEAYRSLASAQCPFLGPPRKRLKQSGSGSPAAKRVKLD

SEQ ID NO: 1088 - protein, 375 aa, synthetic construct
  source 1..375: note = BC2-(GS)1-SPOP-NLS-HA peptide
MQVQLVESGGGLVQPGGSLTLSCTASGFTLDHYDIGWFRQAPGKEREGVSCINNSDDDTYYADSVKGRFTIFMNNAKDTVYLQMNSLKPEDTAIYYCAEARGCKRGRYEYDFWGQGTQVTVSSGSNGLLPDDKLTLFCEVSVVQDSVNISGQNTMNMVKVPECRLADELGGLWENSRFTDCCLCVAGQEFQAHKAILAARSPVFSAMFEHEMEESKKNRVEINDVEPEVFKEMMCFIYTGKAPNLDKMADDLLAAADKYALERLKVMCEDALCSNLSVENAAEILILADLHSADQLKTQAVDFINYHASDVLETSGWKSMVVSHPHLVAEAYRSLASAQCPFLGPPRKRLKQSGSGSPAAKRVKLDYPYDVPDYA

SEQ ID NO: 1089 - protein, 377 aa, synthetic construct
  source 1..377: note = BC2-(GS)2-SPOP-NLS-HA peptide
MQVQLVESGGGLVQPGGSLTLSCTASGFTLDHYDIGWFRQAPGKEREGVSCINNSDDDTYYADSVKGRFTIFMNNAKDTVYLQMNSLKPEDTAIYYCAEARGCKRGRYEYDFWGQGTQVTVSSGSGSNGLLPDDKLTLFCEVSVVQDSVNISGQNTMNMVKVPECRLADELGGLWENSRFTDCCLCVAGQEFQAHKAILAARSPVFSAMFEHEMEESKKNRVEINDVEPEVFKEMMCFIYTGKAPNLDKMADDLLAAADKYALERLKVMCEDALCSNLSVENAAEILILADLHSADQLKTQAVDFINYHASDVLETSGWKSMVVSHPHLVAEAYRSLASAQCPFLGPPRKRLKQSGSGSPAAKRVKLDYPYDVPDYA

SEQ ID NO: 1090 - protein, 379 aa, synthetic construct
  source 1..379: note = BC2-(GS)3-SPOP-NLS-HA peptide
MQVQLVESGGGLVQPGGSLTLSCTASGFTLDHYDIGWFRQAPGKEREGVSCINNSDDDTYYADSVKGRFTIFMNNAKDTVYLQMNSLKPEDTAIYYCAEARGCKRGRYEYDFWGQGTQVTVSSGSGSGSNGLLPDDKLTLFCEVSVVQDSVNISGQNTMNMVKVPECRLADELGGLWENSRFTDCCLCVAGQEFQAHKAILAARSPVFSAMFEHEMEESKKNRVEINDVEPEVFKEMMCFIYTGKAPNLDKMADDLLAAADKYALERLKVMCEDALCSNLSVENAAEILILADLHSADQLKTQAVDFINYHASDVLETSGWKSMVVSHPHLVAEAYRSLASAQCPFLGPPRKRLKQSGSGSPAAKRVKLDYPYDVPDYA

SEQ ID NO: 1091 - protein, 381 aa, synthetic construct
  source 1..381: note = BC2-(GS)4-SPOP-NLS-HA peptide
MQVQLVESGGGLVQPGGSLTLSCTASGFTLDHYDIGWFRQAPGKEREGVSCINNSDDDTYYADSVKGRFTIFMNNAKDTVYLQMNSLKPEDTAIYYCAEARGCKRGRYEYDFWGQGTQVTVSSGSGSGSGSNGLLPDDKLTLFCEVSVVQDSVNISGQNTMNMVKVPECRLADELGGLWENSRFTDCCLCVAGQEFQAHKAILAARSPVFSAMFEHEMEESKKNRVEINDVEPEVFKEMMCFIYTGKAPNLDKMADDLLAAADKYALERLKVMCEDALCSNLSVENAAEILILADLHSADQLKTQAVDFINYHASDVLETSGWKSMVVSHPHLVAEAYRSLASAQCPFLGPPRKRLKQSGSGSPAAKRVKLDYPYDVPDYA

SEQ ID NO: 1092 - protein, 384 aa, synthetic construct
  source 1..384: note = BC2-(GS)5-SPOP-NLS-HA peptide
MQVQLVESGGGLVQPGGSLTLSCTASGFTLDHYDIGWFRQAPGKEREGVSCINNSDDDTYYADSVKGRFTIFMNNAKDTVYLQMNSLKPEDTAIYYCAEARGCKRGRYEYDFWGQGTQVTVSSGSGSGSGSGSNGLLPDDKLTLFCEVSVVQDSVNISGQNTMNMVKVPECRLADELGGLWENSRFTDCCLCVAGQEFQAHKAILAARSPVFSAMFEHEMEESKKNRVEINDVEPEVFKEMMCFIYTGKAPNLDKMADDLLAAADKYALERLKVMCEDALCSNLSVENAAEILILADLHSADQLKTQAVDFINYHASDVLETSGWKSMVVSHPHLVAEAYRSLASAQCPFLGPPRKRLKQSGSGSPAAKRVKLDYPYDVPDYAA

SEQ ID NO: 1093 - protein, 385 aa, synthetic construct
  source 1..385: note = BC2-(GS)6-SPOP-NLS-HA peptide
MQVQLVESGGGLVQPGGSLTLSCTASGFTLDHYDIGWFRQAPGKEREGVSCINNSDDDTYYADSVKGRFTIFMNNAKDTVYLQMNSLKPEDTAIYYCAEARGCKRGRYEYDFWGQGTQVTVSSGSGSGSGSGSGSNGLLPDDKLTLFCEVSVVQDSVNISGQNTMNMVKVPECRLADELGGLWENSRFTDCCLCVAGQEFQAHKAILAARSPVFSAMFEHEMEESKKNRVEINDVEPEVFKEMMCFIYTGKAPNLDKMADDLLAAADKYALERLKVMCEDALCSNLSVENAAEILILADLHSADQLKTQAVDFINYHASDVLETSGWKSMVVSHPHLVAEAYRSLASAQCPFLGPPRKRLKQSGSGSPAAKRVKLDYPYDVPDYA

SEQ ID NO: 1094 - protein, 305 aa, synthetic construct
  source 1..305: note = BC2-(GS)1-CHIP peptide
MQVQLVESGGGLVQPGGSLTLSCTASGFTLDHYDIGWFRQAPGKEREGVSCINNSDDDTYYADSVKGRFTIFMNNAKDTVYLQMNSLKPEDTAIYYCAEARGCKRGRYEYDFWGQGTQVTVSSGSRLNFGDDIPSALRIAKKKRWNSIEERRIHQESELHSYLSRLIAAERERELEECQRNHEGDEDDSHVRAQQACIEAKHDKYMADMDELFSQVDEKRKKRDIPDYLCGKISFELMREPCITPSGITYDRKDIEEHLQRVGHFDPVTRSPLTQEQLIPNLAMKEVIDAFISENGWVEDYGSGS

SEQ ID NO: 1095 - protein, 307 aa, synthetic construct
  source 1..307: note = BC2-(GS)2-CHIP peptide
MQVQLVESGGGLVQPGGSLTLSCTASGFTLDHYDIGWFRQAPGKEREGVSCINNSDDDTYYADSVKGRFTIFMNNAKDTVYLQMNSLKPEDTAIYYCAEARGCKRGRYEYDFWGQGTQVTVSSGSGSRLNFGDDIPSALRIAKKKRWNSIEERRIHQESELHSYLSRLIAAERERELEECQRNHEGDEDDSHVRAQQACIEAKHDKYMADMDELFSQVDEKRKKRDIPDYLCGKISFELMREPCITPSGITYDRKDIEEHLQRVGHFDPVTRSPLTQEQLIPNLAMKEVIDAFISENGWVEDYGSGS

SEQ ID NO: 1096 - protein, 309 aa, synthetic construct
  source 1..309: note = BC2-(GS)3-CHIP peptide
MQVQLVESGGGLVQPGGSLTLSCTASGFTLDHYDIGWFRQAPGKEREGVSCINNSDDDTYYADSVKGRFTIFMNNAKDTVYLQMNSLKPEDTAIYYCAEARGCKRGRYEYDFWGQGTQVTVSSGSGSGSRLNFGDDIPSALRIAKKKRWNSIEERRIHQESELHSYLSRLIAAERERELEECQRNHEGDEDDSHVRAQQACIEAKHDKYMADMDELFSQVDEKRKKRDIPDYLCGKISFELMREPCITPSGITYDRKDIEEHLQRVGHFDPVTRSPLTQEQLIPNLAMKEVIDAFISENGWVEDYGSGS

SEQ ID NO: 1097 - protein, 311 aa, synthetic construct
  source 1..311: note = BC2-(GS)4-CHIP peptide
MQVQLVESGGGLVQPGGSLTLSCTASGFTLDHYDIGWFRQAPGKEREGVSCINNSDDDTYYADSVKGRFTIFMNNAKDTVYLQMNSLKPEDTAIYYCAEARGCKRGRYEYDFWGQGTQVTVSSGSGSGSGSRLNFGDDIPSALRIAKKKRWNSIEERRIHQESELHSYLSRLIAAERERELEECQRNHEGDEDDSHVRAQQACIEAKHDKYMADMDELFSQVDEKRKKRDIPDYLCGKISFELMREPCITPSGITYDRKDIEEHLQRVGHFDPVTRSPLTQEQLIPNLAMKEVIDAFISENGWVEDYGSGS

SEQ ID NO: 1098 - protein, 313 aa, synthetic construct
  source 1..313: note = BC2-(GS)5-CHIP peptide
MQVQLVESGGGLVQPGGSLTLSCTASGFTLDHYDIGWFRQAPGKEREGVSCINNSDDDTYYADSVKGRFTIFMNNAKDTVYLQMNSLKPEDTAIYYCAEARGCKRGRYEYDFWGQGTQVTVSSGSGSGSGSGSRLNFGDDIPSALRIAKKKRWNSIEERRIHQESELHSYLSRLIAAERERELEECQRNHEGDEDDSHVRAQQACIEAKHDKYMADMDELFSQVDEKRKKRDIPDYLCGKISFELMREPCITPSGITYDRKDIEEHLQRVGHFDPVTRSPLTQEQLIPNLAMKEVIDAFISENGWVEDYGSGS

SEQ ID NO: 1099 - protein, 315 aa, synthetic construct
  source 1..315: note = BC2-(GS)6-CHIP peptide
MQVQLVESGGGLVQPGGSLTLSCTASGFTLDHYDIGWFRQAPGKEREGVSCINNSDDDTYYADSVKGRFTIFMNNAKDTVYLQMNSLKPEDTAIYYCAEARGCKRGRYEYDFWGQGTQVTVSSGSGSGSGSGSGSRLNFGDDIPSALRIAKKKRWNSIEERRIHQESELHSYLSRLIAAERERELEECQRNHEGDEDDSHVRAQQACIEAKHDKYMADMDELFSQVDEKRKKRDIPDYLCGKISFELMREPCITPSGITYDRKDIEEHLQRVGHFDPVTRSPLTQEQLIPNLAMKEVIDAFISENGWVEDYGSGS

SEQ ID NO: 1100 - protein, 314 aa, synthetic construct
  source 1..314: note = BC2-(GS)1-CHIP-HA peptide
MQVQLVESGGGLVQPGGSLTLSCTASGFTLDHYDIGWFRQAPGKEREGVSCINNSDDDTYYADSVKGRFTIFMNNAKDTVYLQMNSLKPEDTAIYYCAEARGCKRGRYEYDFWGQGTQVTVSSGSRLNFGDDIPSALRIAKKKRWNSIEERRIHQESELHSYLSRLIAAERERELEECQRNHEGDEDDSHVRAQQACIEAKHDKYMADMDELFSQVDEKRKKRDIPDYLCGKISFELMREPCITPSGITYDRKDIEEHLQRVGHFDPVTRSPLTQEQLIPNLAMKEVIDAFISENGWVEDYGSGSYPYDVPDYA

SEQ ID NO: 1101 - protein, 316 aa, synthetic construct
  source 1..316: note = BC2-(GS)2-CHIP-HA peptide
MQVQLVESGGGLVQPGGSLTLSCTASGFTLDHYDIGWFRQAPGKEREGVSCINNSDDDTYYADSVKGRFTIFMNNAKDTVYLQMNSLKPEDTAIYYCAEARGCKRGRYEYDFWGQGTQVTVSSGSGSRLNFGDDIPSALRIAKKKRWNSIEERRIHQESELHSYLSRLIAAERERELEECQRNHEGDEDDSHVRAQQACIEAKHDKYMADMDELFSQVDEKRKKRDIPDYLCGKISFELMREPCITPSGITYDRKDIEEHLQRVGHFDPVTRSPLTQEQLIPNLAMKEVIDAFISENGWVEDYGSGSYPYDVPDYA

SEQ ID NO: 1102 - protein, 318 aa, synthetic construct
  source 1..318: note = BC2-(GS)3-CHIP-HA peptide
MQVQLVESGGGLVQPGGSLTLSCTASGFTLDHYDIGWFRQAPGKEREGVSCINNSDDDTYYADSVKGRFTIFMNNAKDTVYLQMNSLKPEDTAIYYCAEARGCKRGRYEYDFWGQGTQVTVSSGSGSGSRLNFGDDIPSALRIAKKKRWNSIEERRIHQESELHSYLSRLIAAERERELEECQRNHEGDEDDSHVRAQQACIEAKHDKYMADMDELFSQVDEKRKKRDIPDYLCGKISFELMREPCITPSGITYDRKDIEEHLQRVGHFDPVTRSPLTQEQLIPNLAMKEVIDAFISENGWVEDYGSGSYPYDVPDYA

SEQ ID NO: 1103 - protein, 320 aa, synthetic construct
  source 1..320: note = BC2-(GS)4-CHIP-HA peptide
MQVQLVESGGGLVQPGGSLTLSCTASGFTLDHYDIGWFRQAPGKEREGVSCINNSDDDTYYADSVKGRFTIFMNNAKDTVYLQMNSLKPEDTAIYYCAEARGCKRGRYEYDFWGQGTQVTVSSGSGSGSGSRLNFGDDIPSALRIAKKKRWNSIEERRIHQESELHSYLSRLIAAERERELEECQRNHEGDEDDSHVRAQQACIEAKHDKYMADMDELFSQVDEKRKKRDIPDYLCGKISFELMREPCITPSGITYDRKDIEEHLQRVGHFDPVTRSPLTQEQLIPNLAMKEVIDAFISENGWVEDYGSGSYPYDVPDYA

SEQ ID NO: 1104 - protein, 322 aa, synthetic construct
  source 1..322: note = BC2-(GS)5-CHIP-HA peptide
MQVQLVESGGGLVQPGGSLTLSCTASGFTLDHYDIGWFRQAPGKEREGVSCINNSDDDTYYADSVKGRFTIFMNNAKDTVYLQMNSLKPEDTAIYYCAEARGCKRGRYEYDFWGQGTQVTVSSGSGSGSGSGSRLNFGDDIPSALRIAKKKRWNSIEERRIHQESELHSYLSRLIAAERERELEECQRNHEGDEDDSHVRAQQACIEAKHDKYMADMDELFSQVDEKRKKRDIPDYLCGKISFELMREPCITPSGITYDRKDIEEHLQRVGHFDPVTRSPLTQEQLIPNLAMKEVIDAFISENGWVEDYGSGSYPYDVPDYA

SEQ ID NO: 1105 - protein, 324 aa, synthetic construct
  source 1..324: note = BC2-(GS)6-CHIP-HA peptide
MQVQLVESGGGLVQPGGSLTLSCTASGFTLDHYDIGWFRQAPGKEREGVSCINNSDDDTYYADSVKGRFTIFMNNAKDTVYLQMNSLKPEDTAIYYCAEARGCKRGRYEYDFWGQGTQVTVSSGSGSGSGSGSGSRLNFGDDIPSALRIAKKKRWNSIEERRIHQESELHSYLSRLIAAERERELEECQRNHEGDEDDSHVRAQQACIEAKHDKYMADMDELFSQVDEKRKKRDIPDYLCGKISFELMREPCITPSGITYDRKDIEEHLQRVGHFDPVTRSPLTQEQLIPNLAMKEVIDAFISENGWVEDYGSGSYPYDVPDYA

SEQ ID NO: 1106 - protein, 159 aa, synthetic construct
  source 1..159: note = DCAF1-(GS)1-BC2 peptide
QAPINFTSRLNRRASFPKYGGVDGGCFDRHLIFSRGSQVQLVESGGGLVQPGGSLTLSCTASGFTLDHYDIGWFRQAPGKEREGVSCINNSDDDTYYADSVKGRFTIFMNNAKDTVYLQMNSLKPEDTAIYYCAEARGCKRGRYEYDFWGQGTQVTVSS

SEQ ID NO: 1107 - protein, 161 aa, synthetic construct
  source 1..161: note = DCAF1-(GS)2-BC2 peptide
QAPINFTSRLNRRASFPKYGGVDGGCFDRHLIFSRGSGSQVQLVESGGGLVQPGGSLTLSCTASGFTLDHYDIGWFRQAPGKEREGVSCINNSDDDTYYADSVKGRFTIFMNNAKDTVYLQMNSLKPEDTAIYYCAEARGCKRGRYEYDFWGQGTQVTVSS

SEQ ID NO: 1108 - protein, 163 aa, synthetic construct
  source 1..163: note = DCAF1-(GS)3-BC2 peptide
QAPINFTSRLNRRASFPKYGGVDGGCFDRHLIFSRGSGSGSQVQLVESGGGLVQPGGSLTLSCTASGFTLDHYDIGWFRQAPGKEREGVSCINNSDDDTYYADSVKGRFTIFMNNAKDTVYLQMNSLKPEDTAIYYCAEARGCKRGRYEYDFWGQGTQVTVSS

SEQ ID NO: 1109 - protein, 165 aa, synthetic construct
  source 1..165: note = DCAF1-(GS)4-BC2 peptide
QAPINFTSRLNRRASFPKYGGVDGGCFDRHLIFSRGSGSGSGSQVQLVESGGGLVQPGGSLTLSCTASGFTLDHYDIGWFRQAPGKEREGVSCINNSDDDTYYADSVKGRFTIFMNNAKDTVYLQMNSLKPEDTAIYYCAEARGCKRGRYEYDFWGQGTQVTVSS

SEQ ID NO: 1110 - protein, 167 aa, synthetic construct
  source 1..167: note = DCAF1-(GS)5-BC2 peptide
QAPINFTSRLNRRASFPKYGGVDGGCFDRHLIFSRGSGSGSGSGSQVQLVESGGGLVQPGGSLTLSCTASGFTLDHYDIGWFRQAPGKEREGVSCINNSDDDTYYADSVKGRFTIFMNNAKDTVYLQMNSLKPEDTAIYYCAEARGCKRGRYEYDFWGQGTQVTVSS

SEQ ID NO: 1111 - protein, 169 aa, synthetic construct
  source 1..169: note = DCAF1-(GS)6-BC2 peptide
QAPINFTSRLNRRASFPKYGGVDGGCFDRHLIFSRGSGSGSGSGSGSQVQLVESGGGLVQPGGSLTLSCTASGFTLDHYDIGWFRQAPGKEREGVSCINNSDDDTYYADSVKGRFTIFMNNAKDTVYLQMNSLKPEDTAIYYCAEARGCKRGRYEYDFWGQGTQVTVSS

SEQ ID NO: 1112 - protein, 175 aa, synthetic construct
  source 1..175: note = HA-DCAF1-(GS)1-BC2 peptide
MYPYDVPDYAGSGSGSQAPINFTSRLNRRASFPKYGGVDGGCFDRHLIFSRGSQVQLVESGGGLVQPGGSLTLSCTASGFTLDHYDIGWFRQAPGKEREGVSCINNSDDDTYYADSVKGRFTIFMNNAKDTVYLQMNSLKPEDTAIYYCAEARGCKRGRYEYDFWGQGTQVTVSS

SEQ ID NO: 1113 - protein, 177 aa, synthetic construct
  source 1..177: note = HA-DCAF1-(GS)2-BC2 peptide
MYPYDVPDYAGSGSGSQAPINFTSRLNRRASFPKYGGVDGGCFDRHLIFSRGSGSQVQLVESGGGLVQPGGSLTLSCTASGFTLDHYDIGWFRQAPGKEREGVSCINNSDDDTYYADSVKGRFTIFMNNAKDTVYLQMNSLKPEDTAIYYCAEARGCKRGRYEYDFWGQGTQVTVSS

SEQ ID NO: 1114 - protein, 179 aa, synthetic construct
  source 1..179: note = HA-DCAF1-(GS)3-BC2 peptide
MYPYDVPDYAGSGSGSQAPINFTSRLNRRASFPKYGGVDGGCFDRHLIFSRGSGSGSQVQLVESGGGLVQPGGSLTLSCTASGFTLDHYDIGWFRQAPGKEREGVSCINNSDDDTYYADSVKGRFTIFMNNAKDTVYLQMNSLKPEDTAIYYCAEARGCKRGRYEYDFWGQGTQVTVSS

SEQ ID NO: 1115 - protein, 181 aa, synthetic construct
  source 1..181: note = HA-DCAF1-(GS)4-BC2 peptide
MYPYDVPDYAGSGSGSQAPINFTSRLNRRASFPKYGGVDGGCFDRHLIFSRGSGSGSGSQVQLVESGGGLVQPGGSLTLSCTASGFTLDHYDIGWFRQAPGKEREGVSCINNSDDDTYYADSVKGRFTIFMNNAKDTVYLQMNSLKPEDTAIYYCAEARGCKRGRYEYDFWGQGTQVTVSS

SEQ ID NO: 1116 - protein, 183 aa, synthetic construct
  source 1..183: note = HA-DCAF1-(GS)5-BC2 peptide
MYPYDVPDYAGSGSGSQAPINFTSRLNRRASFPKYGGVDGGCFDRHLIFSRGSGSGSGSGSQVQLVESGGGLVQPGGSLTLSCTASGFTLDHYDIGWFRQAPGKEREGVSCINNSDDDTYYADSVKGRFTIFMNNAKDTVYLQMNSLKPEDTAIYYCAEARGCKRGRYEYDFWGQGTQVTVSS

SEQ ID NO: 1117 - protein, 185 aa, synthetic construct
  source 1..185: note = HA-DCAF1-(GS)6-BC2 peptide
MYPYDVPDYAGSGSGSQAPINFTSRLNRRASFPKYGGVDGGCFDRHLIFSRGSGSGSGSGSGSQVQLVESGGGLVQPGGSLTLSCTASGFTLDHYDIGWFRQAPGKEREGVSCINNSDDDTYYADSVKGRFTIFMNNAKDTVYLQMNSLKPEDTAIYYCAEARGCKRGRYEYDFWGQGTQVTVSS

SEQ ID NO: 1118 - protein, 480 aa, synthetic construct
  source 1..480: note = BC2-(GS)1-E6AP peptide
QVQLVESGGGLVQPGGSLTLSCTASGFTLDHYDIGWFRQAPGKEREGVSCINNSDDDTYYADSVKGRFTIFMNNAKDTVYLQMNSLKPEDTAIYYCAEARGCKRGRYEYDFWGQGTQVTVSSGSNPYLRLKVRRDHIIDDALVRLEMIAMENPADLKKQLYVEFEGEQGVDEGGVSKEFFQLVVEEIFNPDIGMFTYDESTKLFWFNPSSFETEGQFTLIGIVLGLAIYNNCILDVHFPMVVYRKLMGKKGTFRDLGDSHPVLYQSLKDLLEYEGNVEDDMMITFQISQTDLFGNPMMYDLKENGDKIPITNENRKEFVNLYSDYILNKSVEKQFKAFRRGFHMVTNESPLKYLFRPEEIELLICGSRNLDFQALEETTEYDGGYTRDSVLIREFWEIVHSFTDEQKRLFLQFTTGTDRAPVGGLGKLKMIIAKNGPDTERLPTSHTCFNVLLLPEYSSKEKLKERLLKAITYAKGFGML

SEQ ID NO: 1119 - protein, 482 aa, synthetic construct
  source 1..482: note = BC2-(GS)2-E6AP peptide
QVQLVESGGGLVQPGGSLTLSCTASGFTLDHYDIGWFRQAPGKEREGVSCINNSDDDTYYADSVKGRFTIFMNNAKDTVYLQMNSLKPEDTAIYYCAEARGCKRGRYEYDFWGQGTQVTVSSGSGSNPYLRLKVRRDHIIDDALVRLEMIAMENPADLKKQLYVEFEGEQGVDEGGVSKEFFQLVVEEIFNPDIGMFTYDESTKLFWFNPSSFETEGQFTLIGIVLGLAIYNNCILDVHFPMVVYRKLMGKKGTFRDLGDSHPVLYQSLKDLLEYEGNVEDDMMITFQISQTDLFGNPMMYDLKENGDKIPITNENRKEFVNLYSDYILNKSVEKQFKAFRRGFHMVTNESPLKYLFRPEEIELLICGSRNLDFQALEETTEYDGGYTRDSVLIREFWEIVHSFTDEQKRLFLQFTTGTDRAPVGGLGKLKMIIAKNGPDTERLPTSHTCFNVLLLPEYSSKEKLKERLLKAITYAKGFGML

SEQ ID NO: 1120 - protein, 484 aa, synthetic construct
  source 1..484: note = BC2-(GS)3-E6AP peptide
QVQLVESGGGLVQPGGSLTLSCTASGFTLDHYDIGWFRQAPGKEREGVSCINNSDDDTYYADSVKGRFTIFMNNAKDTVYLQMNSLKPEDTAIYYCAEARGCKRGRYEYDFWGQGTQVTVSSGSGSGSNPYLRLKVRRDHIIDDALVRLEMIAMENPADLKKQLYVEFEGEQGVDEGGVSKEFFQLVVEEIFNPDIGMFTYDESTKLFWFNPSSFETEGQFTLIGIVLGLAIYNNCILDVHFPMVVYRKLMGKKGTFRDLGDSHPVLYQSLKDLLEYEGNVEDDMMITFQISQTDLFGNPMMYDLKENGDKIPITNENRKEFVNLYSDYILNKSVEKQFKAFRRGFHMVTNESPLKYLFRPEEIELLICGSRNLDFQALEETTEYDGGYTRDSVLIREFWEIVHSFTDEQKRLFLQFTTGTDRAPVGGLGKLKMIIAKNGPDTERLPTSHTCFNVLLLPEYSSKEKLKERLLKAITYAKGFGML

SEQ ID NO: 1121 - protein, 486 aa, synthetic construct
  source 1..486: note = BC2-(GS)4-E6AP peptide
QVQLVESGGGLVQPGGSLTLSCTASGFTLDHYDIGWFRQAPGKEREGVSCINNSDDDTYYADSVKGRFTIFMNNAKDTVYLQMNSLKPEDTAIYYCAEARGCKRGRYEYDFWGQGTQVTVSSGSGSGSGSNPYLRLKVRRDHIIDDALVRLEMIAMENPADLKKQLYVEFEGEQGVDEGGVSKEFFQLVVEEIFNPDIGMFTYDESTKLFWFNPSSFETEGQFTLIGIVLGLAIYNNCILDVHFPMVVYRKLMGKKGTFRDLGDSHPVLYQSLKDLLEYEGNVEDDMMITFQISQTDLFGNPMMYDLKENGDKIPITNENRKEFVNLYSDYILNKSVEKQFKAFRRGFHMVTNESPLKYLFRPEEIELLICGSRNLDFQALEETTEYDGGYTRDSVLIREFWEIVHSFTDEQKRLFLQFTTGTDRAPVGGLGKLKMIIAKNGPDTERLPTSHTCFNVLLLPEYSSKEKLKERLLKAITYAKGFGML

SEQ ID NO: 1122 - protein, 488 aa, synthetic construct
  source 1..488: note = BC2-(GS)5-E6AP peptide
QVQLVESGGGLVQPGGSLTLSCTASGFTLDHYDIGWFRQAPGKEREGVSCINNSDDDTYYADSVKGRFTIFMNNAKDTVYLQMNSLKPEDTAIYYCAEARGCKRGRYEYDFWGQGTQVTVSSGSGSGSGSGSNPYLRLKVRRDHIIDDALVRLEMIAMENPADLKKQLYVEFEGEQGVDEGGVSKEFFQLVVEEIFNPDIGMFTYDESTKLFWFNPSSFETEGQFTLIGIVLGLAIYNNCILDVHFPMVVYRKLMGKKGTFRDLGDSHPVLYQSLKDLLEYEGNVEDDMMITFQISQTDLFGNPMMYDLKENGDKIPITNENRKEFVNLYSDYILNKSVEKQFKAFRRGFHMVTNESPLKYLFRPEEIELLICGSRNLDFQALEETTEYDGGYTRDSVLIREFWEIVHSFTDEQKRLFLQFTTGTDRAPVGGLGKLKMIIAKNGPDTERLPTSHTCFNVLLLPEYSSKEKLKERLLKAITYAKGFGML

SEQ ID NO: 1123 - protein, 490 aa, synthetic construct
  source 1..490: note = BC2-(GS)6-E6AP peptide
QVQLVESGGGLVQPGGSLTLSCTASGFTLDHYDIGWFRQAPGKEREGVSCINNSDDDTYYADSVKGRFTIFMNNAKDTVYLQMNSLKPEDTAIYYCAEARGCKRGRYEYDFWGQGTQVTVSSGSGSGSGSGSGSNPYLRLKVRRDHIIDDALVRLEMIAMENPADLKKQLYVEFEGEQGVDEGGVSKEFFQLVVEEIFNPDIGMFTYDESTKLFWFNPSSFETEGQFTLIGIVLGLAIYNNCILDVHFPMVVYRKLMGKKGTFRDLGDSHPVLYQSLKDLLEYEGNVEDDMMITFQISQTDLFGNPMMYDLKENGDKIPITNENRKEFVNLYSDYILNKSVEKQFKAFRRGFHMVTNESPLKYLFRPEEIELLICGSRNLDFQALEETTEYDGGYTRDSVLIREFWEIVHSFTDEQKRLFLQFTTGTDRAPVGGLGKLKMIIAKNGPDTERLPTSHTCFNVLLLPEYSSKEKLKERLLKAITYAKGFGML

SEQ ID NO: 1124 - protein, 496 aa, synthetic construct
  source 1..496: note = HA-BC2-(GS)1-E6AP peptide
MYPYDVPDYAGSGSGSQVQLVESGGGLVQPGGSLTLSCTASGFTLDHYDIGWFRQAPGKEREGVSCINNSDDDTYYADSVKGRFTIFMNNAKDTVYLQMNSLKPEDTAIYYCAEARGCKRGRYEYDFWGQGTQVTVSSGSNPYLRLKVRRDHIIDDALVRLEMIAMENPADLKKQLYVEFEGEQGVDEGGVSKEFFQLVVEEIFNPDIGMFTYDESTKLFWFNPSSFETEGQFTLIGIVLGLAIYNNCILDVHFPMVVYRKLMGKKGTFRDLGDSHPVLYQSLKDLLEYEGNVEDDMMITFQISQTDLFGNPMMYDLKENGDKIPITNENRKEFVNLYSDYILNKSVEKQFKAFRRGFHMVTNESPLKYLFRPEEIELLICGSRNLDFQALEETTEYDGGYTRDSVLIREFWEIVHSFTDEQKRLFLQFTTGTDRAPVGGLGKLKMIIAKNGPDTERLPTSHTCFNVLLLPEYSSKEKLKERLLKAITYAKGFGML

SEQ ID NO: 1125 - protein, 498 aa, synthetic construct
  source 1..498: note = HA-BC2-(GS)2-E6AP peptide
MYPYDVPDYAGSGSGSQVQLVESGGGLVQPGGSLTLSCTASGFTLDHYDIGWFRQAPGKEREGVSCINNSDDDTYYADSVKGRFTIFMNNAKDTVYLQMNSLKPEDTAIYYCAEARGCKRGRYEYDFWGQGTQVTVSSGSGSNPYLRLKVRRDHIIDDALVRLEMIAMENPADLKKQLYVEFEGEQGVDEGGVSKEFFQLVVEEIFNPDIGMFTYDESTKLFWFNPSSFETEGQFTLIGIVLGLAIYNNCILDVHFPMVVYRKLMGKKGTFRDLGDSHPVLYQSLKDLLEYEGNVEDDMMITFQISQTDLFGNPMMYDLKENGDKIPITNENRKEFVNLYSDYILNKSVEKQFKAFRRGFHMVTNESPLKYLFRPEEIELLICGSRNLDFQALEETTEYDGGYTRDSVLIREFWEIVHSFTDEQKRLFLQFTTGTDRAPVGGLGKLKMIIAKNGPDTERLPTSHTCFNVLLLPEYSSKEKLKERLLKAITYAKGFGML

SEQ ID NO: 1126 - protein, 500 aa, synthetic construct
  source 1..500: note = HA-BC2-(GS)3-E6AP peptide
MYPYDVPDYAGSGSGSQVQLVESGGGLVQPGGSLTLSCTASGFTLDHYDIGWFRQAPGKEREGVSCINNSDDDTYYADSVKGRFTIFMNNAKDTVYLQMNSLKPEDTAIYYCAEARGCKRGRYEYDFWGQGTQVTVSSGSGSGSNPYLRLKVRRDHIIDDALVRLEMIAMENPADLKKQLYVEFEGEQGVDEGGVSKEFFQLVVEEIFNPDIGMFTYDESTKLFWFNPSSFETEGQFTLIGIVLGLAIYNNCILDVHFPMVVYRKLMGKKGTFRDLGDSHPVLYQSLKDLLEYEGNVEDDMMITFQISQTDLFGNPMMYDLKENGDKIPITNENRKEFVNLYSDYILNKSVEKQFKAFRRGFHMVTNESPLKYLFRPEEIELLICGSRNLDFQALEETTEYDGGYTRDSVLIREFWEIVHSFTDEQKRLFLQFTTGTDRAPVGGLGKLKMIIAKNGPDTERLPTSHTCFNVLLLPEYSSKEKLKERLLKAITYAKGFGML

SEQ ID NO: 1127 - protein, 502 aa, synthetic construct
  source 1..502: note = HA-BC2-(GS)4-E6AP peptide
MYPYDVPDYAGSGSGSQVQLVESGGGLVQPGGSLTLSCTASGFTLDHYDIGWFRQAPGKEREGVSCINNSDDDTYYADSVKGRFTIFMNNAKDTVYLQMNSLKPEDTAIYYCAEARGCKRGRYEYDFWGQGTQVTVSSGSGSGSGSNPYLRLKVRRDHIIDDALVRLEMIAMENPADLKKQLYVEFEGEQGVDEGGVSKEFFQLVVEEIFNPDIGMFTYDESTKLFWFNPSSFETEGQFTLIGIVLGLAIYNNCILDVHFPMVVYRKLMGKKGTFRDLGDSHPVLYQSLKDLLEYEGNVEDDMMITFQISQTDLFGNPMMYDLKENGDKIPITNENRKEFVNLYSDYILNKSVEKQFKAFRRGFHMVTNESPLKYLFRPEEIELLICGSRNLDFQALEETTEYDGGYTRDSVLIREFWEIVHSFTDEQKRLFLQFTTGTDRAPVGGLGKLKMIIAKNGPDTERLPTSHTCFNVLLLPEYSSKEKLKERLLKAITYAKGFGML

SEQ ID NO: 1128 - protein, 504 aa, synthetic construct
  source 1..504: note = HA-BC2-(GS)5-E6AP peptide
MYPYDVPDYAGSGSGSQVQLVESGGGLVQPGGSLTLSCTASGFTLDHYDIGWFRQAPGKEREGVSCINNSDDDTYYADSVKGRFTIFMNNAKDTVYLQMNSLKPEDTAIYYCAEARGCKRGRYEYDFWGQGTQVTVSSGSGSGSGSGSNPYLRLKVRRDHIIDDALVRLEMIAMENPADLKKQLYVEFEGEQGVDEGGVSKEFFQLVVEEIFNPDIGMFTYDESTKLFWFNPSSFETEGQFTLIGIVLGLAIYNNCILDVHFPMVVYRKLMGKKGTFRDLGDSHPVLYQSLKDLLEYEGNVEDDMMITFQISQTDLFGNPMMYDLKENGDKIPITNENRKEFVNLYSDYILNKSVEKQFKAFRRGFHMVTNESPLKYLFRPEEIELLICGSRNLDFQALEETTEYDGGYTRDSVLIREFWEIVHSFTDEQKRLFLQFTTGTDRAPVGGLGKLKMIIAKNGPDTERLPTSHTCFNVLLLPEYSSKEKLKERLLKAITYAKGFGML

SEQ ID NO: 1129 - protein, 506 aa, synthetic construct
  source 1..506: note = HA-BC2-(GS)6-E6AP peptide
MYPYDVPDYAGSGSGSQVQLVESGGGLVQPGGSLTLSCTASGFTLDHYDIGWFRQAPGKEREGVSCINNSDDDTYYADSVKGRFTIFMNNAKDTVYLQMNSLKPEDTAIYYCAEARGCKRGRYEYDFWGQGTQVTVSSGSGSGSGSGSGSNPYLRLKVRRDHIIDDALVRLEMIAMENPADLKKQLYVEFEGEQGVDEGGVSKEFFQLVVEEIFNPDIGMFTYDESTKLFWFNPSSFETEGQFTLIGIVLGLAIYNNCILDVHFPMVVYRKLMGKKGTFRDLGDSHPVLYQSLKDLLEYEGNVEDDMMITFQISQTDLFGNPMMYDLKENGDKIPITNENRKEFVNLYSDYILNKSVEKQFKAFRRGFHMVTNESPLKYLFRPEEIELLICGSRNLDFQALEETTEYDGGYTRDSVLIREFWEIVHSFTDEQKRLFLQFTTGTDRAPVGGLGKLKMIIAKNGPDTERLPTSHTCFNVLLLPEYSSKEKLKERLLKAITYAKGFGML

SEQ ID NO: 1130 - protein, 410 aa, synthetic construct
  source 1..410: note = bTRCP-(GS)1-BC2 peptide
DPAEAVLQEKALKFMCSMPRSLWLGCSSLADSMPSLRCLYNPGTGALTAFQNSSEREDCNNGEPPRKIIPEKNSLRQTYNSCARLCLNQETVCLASTAMKTENCVAKTKLANGTSSMIVPKQRKLSASYEKEKELCVKYFEQWSESDQVEFVEHLISQMCHYQHGHINSYLKPMLQRDFITALPARGLDHIAENILSYLDAKSLCAAELVCKEWYRVTSDGMLWKKLIERMVRTDSLWRGLAERRGWGQYLFKNKPPDGNAPPNSFYRALYPKIIQDIETIESNSRGSQVQLVESGGGLVQPGGSLTLSCTASGFTLDHYDIGWFRQAPGKEREGVSCINNSDDDTYYADSVKGRFTIFMNNAKDTVYLQMNSLKPEDTAIYYCAEARGCKRGRYEYDFWGQGTQVTVSS

SEQ ID NO: 1131 - protein, 412 aa, synthetic construct
  source 1..412: note = bTRCP-(GS)2-BC2 peptide
DPAEAVLQEKALKFMCSMPRSLWLGCSSLADSMPSLRCLYNPGTGALTAFQNSSEREDCNNGEPPRKIIPEKNSLRQTYNSCARLCLNQETVCLASTAMKTENCVAKTKLANGTSSMIVPKQRKLSASYEKEKELCVKYFEQWSESDQVEFVEHLISQMCHYQHGHINSYLKPMLQRDFITALPARGLDHIAENILSYLDAKSLCAAELVCKEWYRVTSDGMLWKKLIERMVRTDSLWRGLAERRGWGQYLFKNKPPDGNAPPNSFYRALYPKIIQDIETIESNSRGSGSQVQLVESGGGLVQPGGSLTLSCTASGFTLDHYDIGWFRQAPGKEREGVSCINNSDDDTYYADSVKGRFTIFMNNAKDTVYLQMNSLKPEDTAIYYCAEARGCKRGRYEYDFWGQGTQVTVSS

SEQ ID NO: 1132 - protein, 414 aa, synthetic construct
  source 1..414: note = bTRCP-(GS)3-BC2 peptide
DPAEAVLQEKALKFMCSMPRSLWLGCSSLADSMPSLRCLYNPGTGALTAFQNSSEREDCNNGEPPRKIIPEKNSLRQTYNSCARLCLNQETVCLASTAMKTENCVAKTKLANGTSSMIVPKQRKLSASYEKEKELCVKYFEQWSESDQVEFVEHLISQMCHYQHGHINSYLKPMLQRDFITALPARGLDHIAENILSYLDAKSLCAAELVCKEWYRVTSDGMLWKKLIERMVRTDSLWRGLAERRGWGQYLFKNKPPDGNAPPNSFYRALYPKIIQDIETIESNSRGSGSGSQVQLVESGGGLVQPGGSLTLSCTASGFTLDHYDIGWFRQAPGKEREGVSCINNSDDDTYYADSVKGRFTIFMNNAKDTVYLQMNSLKPEDTAIYYCAEARGCKRGRYEYDFWGQGTQVTVSS

SEQ ID NO: 1133 - protein, 416 aa, synthetic construct
  source 1..416: note = bTRCP-(GS)4-BC2 peptide
DPAEAVLQEKALKFMCSMPRSLWLGCSSLADSMPSLRCLYNPGTGALTAFQNSSEREDCNNGEPPRKIIPEKNSLRQTYNSCARLCLNQETVCLASTAMKTENCVAKTKLANGTSSMIVPKQRKLSASYEKEKELCVKYFEQWSESDQVEFVEHLISQMCHYQHGHINSYLKPMLQRDFITALPARGLDHIAENILSYLDAKSLCAAELVCKEWYRVTSDGMLWKKLIERMVRTDSLWRGLAERRGWGQYLFKNKPPDGNAPPNSFYRALYPKIIQDIETIESNSRGSGSGSGSQVQLVESGGGLVQPGGSLTLSCTASGFTLDHYDIGWFRQAPGKEREGVSCINNSDDDTYYADSVKGRFTIFMNNAKDTVYLQMNSLKPEDTAIYYCAEARGCKRGRYEYDFWGQGTQVTVSS

SEQ ID NO: 1134 - protein, 418 aa, synthetic construct
  source 1..418: note = bTRCP-(GS)5-BC2 peptide
DPAEAVLQEKALKFMCSMPRSLWLGCSSLADSMPSLRCLYNPGTGALTAFQNSSEREDCNNGEPPRKIIPEKNSLRQTYNSCARLCLNQETVCLASTAMKTENCVAKTKLANGTSSMIVPKQRKLSASYEKEKELCVKYFEQWSESDQVEFVEHLISQMCHYQHGHINSYLKPMLQRDFITALPARGLDHIAENILSYLDAKSLCAAELVCKEWYRVTSDGMLWKKLIERMVRTDSLWRGLAERRGWGQYLFKNKPPDGNAPPNSFYRALYPKIIQDIETIESNSRGSGSGSGSGSQVQLVESGGGLVQPGGSLTLSCTASGFTLDHYDIGWFRQAPGKEREGVSCINNSDDDTYYADSVKGRFTIFMNNAKDTVYLQMNSLKPEDTAIYYCAEARGCKRGRYEYDFWGQGTQVTVSS

SEQ ID NO: 1135 - protein, 420 aa, synthetic construct
  source 1..420: note = bTRCP-(GS)6-BC2 peptide
DPAEAVLQEKALKFMCSMPRSLWLGCSSLADSMPSLRCLYNPGTGALTAFQNSSEREDCNNGEPPRKIIPEKNSLRQTYNSCARLCLNQETVCLASTAMKTENCVAKTKLANGTSSMIVPKQRKLSASYEKEKELCVKYFEQWSESDQVEFVEHLISQMCHYQHGHINSYLKPMLQRDFITALPARGLDHIAENILSYLDAKSLCAAELVCKEWYRVTSDGMLWKKLIERMVRTDSLWRGLAERRGWGQYLFKNKPPDGNAPPNSFYRALYPKIIQDIETIESNSRGSGSGSGSGSGSQVQLVESGGGLVQPGGSLTLSCTASGFTLDHYDIGWFRQAPGKEREGVSCINNSDDDTYYADSVKGRFTIFMNNAKDTVYLQMNSLKPEDTAIYYCAEARGCKRGRYEYDFWGQGTQVTVSS

SEQ ID NO: 1136 - protein, 420 aa, synthetic construct
  source 1..420: note = HA-bTRCP-(GS)1-BC2 peptide
MYPYDVPDYADPAEAVLQEKALKFMCSMPRSLWLGCSSLADSMPSLRCLYNPGTGALTAFQNSSEREDCNNGEPPRKIIPEKNSLRQTYNSCARLCLNQETVCLASTAMKTENCVAKTKLANGTSSMIVPKQRKLSASYEKEKELCVKYFEQWSESDQVEFVEHLISQMCHYQHGHINSYLKPMLQRDFITALPARGLDHIAENILSYLDAKSLCAAELVCKEWYRVTSDGMLWKKLIERMVRTDSLWRGLAERRGWGQYLFKNKPPDGNAPPNSFYRALYPKIIQDIETIESNSRGSQVQLVESGGGLVQPGGSLTLSCTASGFTLDHYDIGWFRQAPGKEREGVSCINNSDDDTYYADSVKGRFTIFMNNAKDTVYLQMNSLKPEDTAIYYCAEARGCKRGRYEYDFWGQGTQVTVSS

SEQ ID NO: 1137 - protein, 422 aa, synthetic construct
  source 1..422: note = HA-bTRCP-(GS)2-BC2 peptide
MYPYDVPDYADPAEAVLQEKALKFMCSMPRSLWLGCSSLADSMPSLRCLYNPGTGALTAFQNSSEREDCNNGEPPRKIIPEKNSLRQTYNSCARLCLNQETVCLASTAMKTENCVAKTKLANGTSSMIVPKQRKLSASYEKEKELCVKYFEQWSESDQVEFVEHLISQMCHYQHGHINSYLKPMLQRDFITALPARGLDHIAENILSYLDAKSLCAAELVCKEWYRVTSDGMLWKKLIERMVRTDSLWRGLAERRGWGQYLFKNKPPDGNAPPNSFYRALYPKIIQDIETIESNSRGSGSQVQLVESGGGLVQPGGSLTLSCTASGFTLDHYDIGWFRQAPGKEREGVSCINNSDDDTYYADSVKGRFTIFMNNAKDTVYLQMNSLKPEDTAIYYCAEARGCKRGRYEYDFWGQGTQVTVSS

SEQ ID NO: 1138 - protein, 424 aa, synthetic construct
  source 1..424: note = HA-bTRCP-(GS)3-BC2 peptide
MYPYDVPDYADPAEAVLQEKALKFMCSMPRSLWLGCSSLADSMPSLRCLYNPGTGALTAFQNSSEREDCNNGEPPRKIIPEKNSLRQTYNSCARLCLNQETVCLASTAMKTENCVAKTKLANGTSSMIVPKQRKLSASYEKEKELCVKYFEQWSESDQVEFVEHLISQMCHYQHGHINSYLKPMLQRDFITALPARGLDHIAENILSYLDAKSLCAAELVCKEWYRVTSDGMLWKKLIERMVRTDSLWRGLAERRGWGQYLFKNKPPDGNAPPNSFYRALYPKIIQDIETIESNSRGSGSGSQVQLVESGGGLVQPGGSLTLSCTASGFTLDHYDIGWFRQAPGKEREGVSCINNSDDDTYYADSVKGRFTIFMNNAKDTVYLQMNSLKPEDTAIYYCAEARGCKRGRYEYDFWGQGTQVTVSS

SEQ ID NO: 1139 - protein, 426 aa, synthetic construct
  source 1..426: note = HA-bTRCP-(GS)4-BC2 peptide
MYPYDVPDYADPAEAVLQEKALKFMCSMPRSLWLGCSSLADSMPSLRCLYNPGTGALTAFQNSSEREDCNNGEPPRKIIPEKNSLRQTYNSCARLCLNQETVCLASTAMKTENCVAKTKLANGTSSMIVPKQRKLSASYEKEKELCVKYFEQWSESDQVEFVEHLISQMCHYQHGHINSYLKPMLQRDFITALPARGLDHIAENILSYLDAKSLCAAELVCKEWYRVTSDGMLWKKLIERMVRTDSLWRGLAERRGWGQYLFKNKPPDGNAPPNSFYRALYPKIIQDIETIESNSRGSGSGSGSQVQLVESGGGLVQPGGSLTLSCTASGFTLDHYDIGWFRQAPGKEREGVSCINNSDDDTYYADSVKGRFTIFMNNAKDTVYLQMNSLKPEDTAIYYCAEARGCKRGRYEYDFWGQGTQVTVSS

SEQ ID NO: 1140 - protein, 428 aa, synthetic construct
  source 1..428: note = HA-bTRCP-(GS)5-BC2 peptide
MYPYDVPDYADPAEAVLQEKALKFMCSMPRSLWLGCSSLADSMPSLRCLYNPGTGALTAFQNSSEREDCNNGEPPRKIIPEKNSLRQTYNSCARLCLNQETVCLASTAMKTENCVAKTKLANGTSSMIVPKQRKLSASYEKEKELCVKYFEQWSESDQVEFVEHLISQMCHYQHGHINSYLKPMLQRDFITALPARGLDHIAENILSYLDAKSLCAAELVCKEWYRVTSDGMLWKKLIERMVRTDSLWRGLAERRGWGQYLFKNKPPDGNAPPNSFYRALYPKIIQDIETIESNSRGSGSGSGSGSQVQLVESGGGLVQPGGSLTLSCTASGFTLDHYDIGWFRQAPGKEREGVSCINNSDDDTYYADSVKGRFTIFMNNAKDTVYLQMNSLKPEDTAIYYCAEARGCKRGRYEYDFWGQGTQVTVSS

SEQ ID NO: 1141 - protein, 430 aa, synthetic construct
  source 1..430: note = HA-bTRCP-(GS)6-BC2 peptide
MYPYDVPDYADPAEAVLQEKALKFMCSMPRSLWLGCSSLADSMPSLRCLYNPGTGALTAFQNSSEREDCNNGEPPRKIIPEKNSLRQTYNSCARLCLNQETVCLASTAMKTENCVAKTKLANGTSSMIVPKQRKLSASYEKEKELCVKYFEQWSESDQVEFVEHLISQMCHYQHGHINSYLKPMLQRDFITALPARGLDHIAENILSYLDAKSLCAAELVCKEWYRVTSDGMLWKKLIERMVRTDSLWRGLAERRGWGQYLFKNKPPDGNAPPNSFYRALYPKIIQDIETIESNSRGSGSGSGSGSGSQVQLVESGGGLVQPGGSLTLSCTASGFTLDHYDIGWFRQAPGKEREGVSCINNSDDDTYYADSVKGRFTIFMNNAKDTVYLQMNSLKPEDTAIYYCAEARGCKRGRYEYDFWGQGTQVTVSS

SEQ ID NO: 1142 - protein, 445 aa, synthetic construct
  source 1..445: note = Keap1-(GS)1-BC2 peptide
QPDPRPSGAGACCRFLPLQSQCPEGAGDAVMYASTECKAEVTPSQHGNRTFSYTLEDHTKQAFGIMNELRLSQQLCDVTLQVKYQDAPAAQFMAHKVVLASSSPVFKAMFTNGLREQGMEVVSIEGIHPKVMERLIEFAYTASISMGEKCVLHVMNGAVMYQIDSVVRACSDFLVQQLDPSNAIGIANFAEQIGCVELHQRAREYIYMHFGEVAKQEEFFNLSHCQLVTLISRDDLNVRCESEVFHACINWVKYDCEQRRFYVQALLRAVRCHSLTPNFLQMQLQKCEILQSDSRCKDYLVKIFEELTLHKPTQVMPCRAPGSQVQLVESGGGLVQPGGSLTLSCTASGFTLDHYDIGWFRQAPGKEREGVSCINNSDDDTYYADSVKGRFTIFMNNAKDTVYLQMNSLKPEDTAIYYCAEARGCKRGRYEYDFWGQGTQVTVSS

SEQ ID NO: 1143 - protein, 447 aa, synthetic construct
  source 1..447: note = Keap1-(GS)2-BC2 peptide
QPDPRPSGAGACCRFLPLQSQCPEGAGDAVMYASTECKAEVTPSQHGNRTFSYTLEDHTKQAFGIMNELRLSQQLCDVTLQVKYQDAPAAQFMAHKVVLASSSPVFKAMFTNGLREQGMEVVSIEGIHPKVMERLIEFAYTASISMGEKCVLHVMNGAVMYQIDSVVRACSDFLVQQLDPSNAIGIANFAEQIGCVELHQRAREYIYMHFGEVAKQEEFFNLSHCQLVTLISRDDLNVRCESEVFHACINWVKYDCEQRRFYVQALLRAVRCHSLTPNFLQMQLQKCEILQSDSRCKDYLVKIFEELTLHKPTQVMPCRAPGSGSQVQLVESGGGLVQPGGSLTLSCTASGFTLDHYDIGWFRQAPGKEREGVSCINNSDDDTYYADSVKGRFTIFMNNAKDTVYLQMNSLKPEDTAIYYCAEARGCKRGRYEYDFWGQGTQVTVSS

SEQ ID NO: 1144 - protein, 449 aa, synthetic construct
  source 1..449: note = Keap1-(GS)3-BC2 peptide
QPDPRPSGAGACCRFLPLQSQCPEGAGDAVMYASTECKAEVTPSQHGNRTFSYTLEDHTKQAFGIMNELRLSQQLCDVTLQVKYQDAPAAQFMAHKVVLASSSPVFKAMFTNGLREQGMEVVSIEGIHPKVMERLIEFAYTASISMGEKCVLHVMNGAVMYQIDSVVRACSDFLVQQLDPSNAIGIANFAEQIGCVELHQRAREYIYMHFGEVAKQEEFFNLSHCQLVTLISRDDLNVRCESEVFHACINWVKYDCEQRRFYVQALLRAVRCHSLTPNFLQMQLQKCEILQSDSRCKDYLVKIFEELTLHKPTQVMPCRAPGSGSGSQVQLVESGGGLVQPGGSLTLSCTASGFTLDHYDIGWFRQAPGKEREGVSCINNSDDDTYYADSVKGRFTIFMNNAKDTVYLQMNSLKPEDTAIYYCAEARGCKRGRYEYDFWGQGTQVTVSS

SEQ ID NO: 1145 - protein, 451 aa, synthetic construct
  source 1..451: note = Keap1-(GS)4-BC2 peptide
QPDPRPSGAGACCRFLPLQSQCPEGAGDAVMYASTECKAEVTPSQHGNRTFSYTLEDHTKQAFGIMNELRLSQQLCDVTLQVKYQDAPAAQFMAHKVVLASSSPVFKAMFTNGLREQGMEVVSIEGIHPKVMERLIEFAYTASISMGEKCVLHVMNGAVMYQIDSVVRACSDFLVQQLDPSNAIGIANFAEQIGCVELHQRAREYIYMHFGEVAKQEEFFNLSHCQLVTLISRDDLNVRCESEVFHACINWVKYDCEQRRFYVQALLRAVRCHSLTPNFLQMQLQKCEILQSDSRCKDYLVKIFEELTLHKPTQVMPCRAPGSGSGSGSQVQLVESGGGLVQPGGSLTLSCTASGFTLDHYDIGWFRQAPGKEREGVSCINNSDDDTYYADSVKGRFTIFMNNAKDTVYLQMNSLKPEDTAIYYCAEARGCKRGRYEYDFWGQGTQVTVSS

SEQ ID NO: 1146 - protein, 453 aa, synthetic construct
  source 1..453: note = Keap1-(GS)5-BC2 peptide
QPDPRPSGAGACCRFLPLQSQCPEGAGDAVMYASTECKAEVTPSQHGNRTFSYTLEDHTKQAFGIMNELRLSQQLCDVTLQVKYQDAPAAQFMAHKVVLASSSPVFKAMFTNGLREQGMEVVSIEGIHPKVMERLIEFAYTASISMGEKCVLHVMNGAVMYQIDSVVRACSDFLVQQLDPSNAIGIANFAEQIGCVELHQRAREYIYMHFGEVAKQEEFFNLSHCQLVTLISRDDLNVRCESEVFHACINWVKYDCEQRRFYVQALLRAVRCHSLTPNFLQMQLQKCEILQSDSRCKDYLVKIFEELTLHKPTQVMPCRAPGSGSGSGSGSQVQLVESGGGLVQPGGSLTLSCTASGFTLDHYDIGWFRQAPGKEREGVSCINNSDDDTYYADSVKGRFTIFMNNAKDTVYLQMNSLKPEDTAIYYCAEARGCKRGRYEYDFWGQGTQVTVSS

SEQ ID NO: 1147 - protein, 455 aa, synthetic construct
  source 1..455: note = Keap1-(GS)6-BC2 peptide
QPDPRPSGAGACCRFLPLQSQCPEGAGDAVMYASTECKAEVTPSQHGNRTFSYTLEDHTKQAFGIMNELRLSQQLCDVTLQVKYQDAPAAQFMAHKVVLASSSPVFKAMFTNGLREQGMEVVSIEGIHPKVMERLIEFAYTASISMGEKCVLHVMNGAVMYQIDSVVRACSDFLVQQLDPSNAIGIANFAEQIGCVELHQRAREYIYMHFGEVAKQEEFFNLSHCQLVTLISRDDLNVRCESEVFHACINWVKYDCEQRRFYVQALLRAVRCHSLTPNFLQMQLQKCEILQSDSRCKDYLVKIFEELTLHKPTQVMPCRAPGSGSGSGSGSGSQVQLVESGGGLVQPGGSLTLSCTASGFTLDHYDIGWFRQAPGKEREGVSCINNSDDDTYYADSVKGRFTIFMNNAKDTVYLQMNSLKPEDTAIYYCAEARGCKRGRYEYDFWGQGTQVTVSS

SEQ ID NO: 1148 - protein, 461 aa, synthetic construct
  source 1..461: note = HA-Keap1-(GS)1-BC2 peptide
MYPYDVPDYAGSGSGSQPDPRPSGAGACCRFLPLQSQCPEGAGDAVMYASTECKAEVTPSQHGNRTFSYTLEDHTKQAFGIMNELRLSQQLCDVTLQVKYQDAPAAQFMAHKVVLASSSPVFKAMFTNGLREQGMEVVSIEGIHPKVMERLIEFAYTASISMGEKCVLHVMNGAVMYQIDSVVRACSDFLVQQLDPSNAIGIANFAEQIGCVELHQRAREYIYMHFGEVAKQEEFFNLSHCQLVTLISRDDLNVRCESEVFHACINWVKYDCEQRRFYVQALLRAVRCHSLTPNFLQMQLQKCEILQSDSRCKDYLVKIFEELTLHKPTQVMPCRAPGSQVQLVESGGGLVQPGGSLTLSCTASGFTLDHYDIGWFRQAPGKEREGVSCINNSDDDTYYADSVKGRFTIFMNNAKDTVYLQMNSLKPEDTAIYYCAEARGCKRGRYEYDFWGQGTQVTVSS

SEQ ID NO: 1149 - protein, 463 aa, synthetic construct
  source 1..463: note = HA-Keap1-(GS)2-BC2 peptide
MYPYDVPDYAGSGSGSQPDPRPSGAGACCRFLPLQSQCPEGAGDAVMYASTECKAEVTPSQHGNRTFSYTLEDHTKQAFGIMNELRLSQQLCDVTLQVKYQDAPAAQFMAHKVVLASSSPVFKAMFTNGLREQGMEVVSIEGIHPKVMERLIEFAYTASISMGEKCVLHVMNGAVMYQIDSVVRACSDFLVQQLDPSNAIGIANFAEQIGCVELHQRAREYIYMHFGEVAKQEEFFNLSHCQLVTLISRDDLNVRCESEVFHACINWVKYDCEQRRFYVQALLRAVRCHSLTPNFLQMQLQKCEILQSDSRCKDYLVKIFEELTLHKPTQVMPCRAPGSGSQVQLVESGGGLVQPGGSLTLSCTASGFTLDHYDIGWFRQAPGKEREGVSCINNSDDDTYYADSVKGRFTIFMNNAKDTVYLQMNSLKPEDTAIYYCAEARGCKRGRYEYDFWGQGTQVTVSS

SEQ ID NO: 1150 - protein, 465 aa, synthetic construct
  source 1..465: note = HA-Keap1-(GS)3-BC2 peptide
MYPYDVPDYAGSGSGSQPDPRPSGAGACCRFLPLQSQCPEGAGDAVMYASTECKAEVTPSQHGNRTFSYTLEDHTKQAFGIMNELRLSQQLCDVTLQVKYQDAPAAQFMAHKVVLASSSPVFKAMFTNGLREQGMEVVSIEGIHPKVMERLIEFAYTASISMGEKCVLHVMNGAVMYQIDSVVRACSDFLVQQLDPSNAIGIANFAEQIGCVELHQRAREYIYMHFGEVAKQEEFFNLSHCQLVTLISRDDLNVRCESEVFHACINWVKYDCEQRRFYVQALLRAVRCHSLTPNFLQMQLQKCEILQSDSRCKDYLVKIFEELTLHKPTQVMPCRAPGSGSGSQVQLVESGGGLVQPGGSLTLSCTASGFTLDHYDIGWFRQAPGKEREGVSCINNSDDDTYYADSVKGRFTIFMNNAKDTVYLQMNSLKPEDTAIYYCAEARGCKRGRYEYDFWGQGTQVTVSS

SEQ ID NO: 1151 - protein, 467 aa, synthetic construct
  source 1..467: note = HA-Keap1-(GS)4-BC2 peptide
MYPYDVPDYAGSGSGSQPDPRPSGAGACCRFLPLQSQCPEGAGDAVMYASTECKAEVTPSQHGNRTFSYTLEDHTKQAFGIMNELRLSQQLCDVTLQVKYQDAPAAQFMAHKVVLASSSPVFKAMFTNGLREQGMEVVSIEGIHPKVMERLIEFAYTASISMGEKCVLHVMNGAVMYQIDSVVRACSDFLVQQLDPSNAIGIANFAEQIGCVELHQRAREYIYMHFGEVAKQEEFFNLSHCQLVTLISRDDLNVRCESEVFHACINWVKYDCEQRRFYVQALLRAVRCHSLTPNFLQMQLQKCEILQSDSRCKDYLVKIFEELTLHKPTQVMPCRAPGSGSGSGSQVQLVESGGGLVQPGGSLTLSCTASGFTLDHYDIGWFRQAPGKEREGVSCINNSDDDTYYADSVKGRFTIFMNNAKDTVYLQMNSLKPEDTAIYYCAEARGCKRGRYEYDFWGQGTQVTVSS

SEQ ID NO: 1152 - protein, 469 aa, synthetic construct
  source 1..469: note = HA-Keap1-(GS)5-BC2 peptide
MYPYDVPDYAGSGSGSQPDPRPSGAGACCRFLPLQSQCPEGAGDAVMYASTECKAEVTPSQHGNRTFSYTLEDHTKQAFGIMNELRLSQQLCDVTLQVKYQDAPAAQFMAHKVVLASSSPVFKAMFTNGLREQGMEVVSIEGIHPKVMERLIEFAYTASISMGEKCVLHVMNGAVMYQIDSVVRACSDFLVQQLDPSNAIGIANFAEQIGCVELHQRAREYIYMHFGEVAKQEEFFNLSHCQLVTLISRDDLNVRCESEVFHACINWVKYDCEQRRFYVQALLRAVRCHSLTPNFLQMQLQKCEILQSDSRCKDYLVKIFEELTLHKPTQVMPCRAPGSGSGSGSGSQVQLVESGGGLVQPGGSLTLSCTASGFTLDHYDIGWFRQAPGKEREGVSCINNSDDDTYYADSVKGRFTIFMNNAKDTVYLQMNSLKPEDTAIYYCAEARGCKRGRYEYDFWGQGTQVTVSS

SEQ ID NO: 1153 - protein, 471 aa, synthetic construct
  source 1..471: note = HA-Keap1-(GS)6-BC2 peptide
MYPYDVPDYAGSGSGSQPDPRPSGAGACCRFLPLQSQCPEGAGDAVMYASTECKAEVTPSQHGNRTFSYTLEDHTKQAFGIMNELRLSQQLCDVTLQVKYQDAPAAQFMAHKVVLASSSPVFKAMFTNGLREQGMEVVSIEGIHPKVMERLIEFAYTASISMGEKCVLHVMNGAVMYQIDSVVRACSDFLVQQLDPSNAIGIANFAEQIGCVELHQRAREYIYMHFGEVAKQEEFFNLSHCQLVTLISRDDLNVRCESEVFHACINWVKYDCEQRRFYVQALLRAVRCHSLTPNFLQMQLQKCEILQSDSRCKDYLVKIFEELTLHKPTQVMPCRAPGSGSGSGSGSGSQVQLVESGGGLVQPGGSLTLSCTASGFTLDHYDIGWFRQAPGKEREGVSCINNSDDDTYYADSVKGRFTIFMNNAKDTVYLQMNSLKPEDTAIYYCAEARGCKRGRYEYDFWGQGTQVTVSS

SEQ ID NO: 1154 - protein, 251 aa, synthetic construct
  source 1..251: note = RNF125-(GS)1-BC2 peptide
GSVLSTDSGKSAPASATARALERRRDPELPVTSFDCAVCLEVLHQPVRTRCGHVFCRSCIATSLKNNKWTCPYCRAYLPSEGVPATDVAKRMKSEYKNCAECDTLVCLSEMRAHIRTCQKYIDKYGPGSQVQLVESGGGLVQPGGSLTLSCTASGFTLDHYDIGWFRQAPGKEREGVSCINNSDDDTYYADSVKGRFTIFMNNAKDTVYLQMNSLKPEDTAIYYCAEARGCKRGRYEYDFWGQGTQVTVSS

SEQ ID NO: 1155 - protein, 253 aa, synthetic construct
  source 1..253: note = RNF125-(GS)2-BC2 peptide
GSVLSTDSGKSAPASATARALERRRDPELPVTSFDCAVCLEVLHQPVRTRCGHVFCRSCIATSLKNNKWTCPYCRAYLPSEGVPATDVAKRMKSEYKNCAECDTLVCLSEMRAHIRTCQKYIDKYGPGSGSQVQLVESGGGLVQPGGSLTLSCTASGFTLDHYDIGWFRQAPGKEREGVSCINNSDDDTYYADSVKGRFTIFMNNAKDTVYLQMNSLKPEDTAIYYCAEARGCKRGRYEYDFWGQGTQVTVSS

SEQ ID NO: 1156 - protein, 255 aa, synthetic construct
  source 1..255: note = RNF125-(GS)3-BC2 peptide
GSVLSTDSGKSAPASATARALERRRDPELPVTSFDCAVCLEVLHQPVRTRCGHVFCRSCIATSLKNNKWTCPYCRAYLPSEGVPATDVAKRMKSEYKNCAECDTLVCLSEMRAHIRTCQKYIDKYGPGSGSGSQVQLVESGGGLVQPGGSLTLSCTASGFTLDHYDIGWFRQAPGKEREGVSCINNSDDDTYYADSVKGRFTIFMNNAKDTVYLQMNSLKPEDTAIYYCAEARGCKRGRYEYDFWGQGTQVTVSS

SEQ ID NO: 1157 - protein, 257 aa, synthetic construct
  source 1..257: note = RNF125-(GS)4-BC2 peptide
GSVLSTDSGKSAPASATARALERRRDPELPVTSFDCAVCLEVLHQPVRTRCGHVFCRSCIATSLKNNKWTCPYCRAYLPSEGVPATDVAKRMKSEYKNCAECDTLVCLSEMRAHIRTCQKYIDKYGPGSGSGSGSQVQLVESGGGLVQPGGSLTLSCTASGFTLDHYDIGWFRQAPGKEREGVSCINNSDDDTYYADSVKGRFTIFMNNAKDTVYLQMNSLKPEDTAIYYCAEARGCKRGRYEYDFWGQGTQVTVSS

SEQ ID NO: 1158 - protein, 259 aa, synthetic construct
  source 1..259: note = RNF125-(GS)5-BC2 peptide
GSVLSTDSGKSAPASATARALERRRDPELPVTSFDCAVCLEVLHQPVRTRCGHVFCRSCIATSLKNNKWTCPYCRAYLPSEGVPATDVAKRMKSEYKNCAECDTLVCLSEMRAHIRTCQKYIDKYGPGSGSGSGSGSQVQLVESGGGLVQPGGSLTLSCTASGFTLDHYDIGWFRQAPGKEREGVSCINNSDDDTYYADSVKGRFTIFMNNAKDTVYLQMNSLKPEDTAIYYCAEARGCKRGRYEYDFWGQGTQVTVSS

SEQ ID NO: 1159 - protein, 261 aa, synthetic construct
  source 1..261: note = RNF125-(GS)6-BC2 peptide
GSVLSTDSGKSAPASATARALERRRDPELPVTSFDCAVCLEVLHQPVRTRCGHVFCRSCIATSLKNNKWTCPYCRAYLPSEGVPATDVAKRMKSEYKNCAECDTLVCLSEMRAHIRTCQKYIDKYGPGSGSGSGSGSGSQVQLVESGGGLVQPGGSLTLSCTASGFTLDHYDIGWFRQAPGKEREGVSCINNSDDDTYYADSVKGRFTIFMNNAKDTVYLQMNSLKPEDTAIYYCAEARGCKRGRYEYDFWGQGTQVTVSS

SEQ ID NO: 1160 - protein, 267 aa, synthetic construct
  source 1..267: note = HA-RNF125-(GS)1-BC2 peptide
MYPYDVPDYAGSGSGSGSVLSTDSGKSAPASATARALERRRDPELPVTSFDCAVCLEVLHQPVRTRCGHVFCRSCIATSLKNNKWTCPYCRAYLPSEGVPATDVAKRMKSEYKNCAECDTLVCLSEMRAHIRTCQKYIDKYGPGSQVQLVESGGGLVQPGGSLTLSCTASGFTLDHYDIGWFRQAPGKEREGVSCINNSDDDTYYADSVKGRFTIFMNNAKDTVYLQMNSLKPEDTAIYYCAEARGCKRGRYEYDFWGQGTQVTVSS

SEQ ID NO: 1161 - protein, 269 aa, synthetic construct
  source 1..269: note = HA-RNF125-(GS)2-BC2 peptide
MYPYDVPDYAGSGSGSGSVLSTDSGKSAPASATARALERRRDPELPVTSFDCAVCLEVLHQPVRTRCGHVFCRSCIATSLKNNKWTCPYCRAYLPSEGVPATDVAKRMKSEYKNCAECDTLVCLSEMRAHIRTCQKYIDKYGPGSGSQVQLVESGGGLVQPGGSLTLSCTASGFTLDHYDIGWFRQAPGKEREGVSCINNSDDDTYYADSVKGRFTIFMNNAKDTVYLQMNSLKPEDTAIYYCAEARGCKRGRYEYDFWGQGTQVTVSS

SEQ ID NO: 1162 - protein, 271 aa, synthetic construct
  source 1..271: note = HA-RNF125-(GS)3-BC2 peptide
MYPYDVPDYAGSGSGSGSVLSTDSGKSAPASATARALERRRDPELPVTSFDCAVCLEVLHQPVRTRCGHVFCRSCIATSLKNNKWTCPYCRAYLPSEGVPATDVAKRMKSEYKNCAECDTLVCLSEMRAHIRTCQKYIDKYGPGSGSGSQVQLVESGGGLVQPGGSLTLSCTASGFTLDHYDIGWFRQAPGKEREGVSCINNSDDDTYYADSVKGRFTIFMNNAKDTVYLQMNSLKPEDTAIYYCAEARGCKRGRYEYDFWGQGTQVTVSS

SEQ ID NO: 1163 - protein, 273 aa, synthetic construct
  source 1..273: note = HA-RNF125-(GS)4-BC2 peptide
MYPYDVPDYAGSGSGSGSVLSTDSGKSAPASATARALERRRDPELPVTSFDCAVCLEVLHQPVRTRCGHVFCRSCIATSLKNNKWTCPYCRAYLPSEGVPATDVAKRMKSEYKNCAECDTLVCLSEMRAHIRTCQKYIDKYGPGSGSGSGSQVQLVESGGGLVQPGGSLTLSCTASGFTLDHYDIGWFRQAPGKEREGVSCINNSDDDTYYADSVKGRFTIFMNNAKDTVYLQMNSLKPEDTAIYYCAEARGCKRGRYEYDFWGQGTQVTVSS

SEQ ID NO: 1164 - protein, 275 aa, synthetic construct
  source 1..275: note = HA-RNF125-(GS)5-BC2 peptide
MYPYDVPDYAGSGSGSGSVLSTDSGKSAPASATARALERRRDPELPVTSFDCAVCLEVLHQPVRTRCGHVFCRSCIATSLKNNKWTCPYCRAYLPSEGVPATDVAKRMKSEYKNCAECDTLVCLSEMRAHIRTCQKYIDKYGPGSGSGSGSGSQVQLVESGGGLVQPGGSLTLSCTASGFTLDHYDIGWFRQAPGKEREGVSCINNSDDDTYYADSVKGRFTIFMNNAKDTVYLQMNSLKPEDTAIYYCAEARGCKRGRYEYDFWGQGTQVTVSS

SEQ ID NO: 1165 - protein, 277 aa, synthetic construct
  source 1..277: note = HA-RNF125-(GS)6-BC2 peptide
MYPYDVPDYAGSGSGSGSVLSTDSGKSAPASATARALERRRDPELPVTSFDCAVCLEVLHQPVRTRCGHVFCRSCIATSLKNNKWTCPYCRAYLPSEGVPATDVAKRMKSEYKNCAECDTLVCLSEMRAHIRTCQKYIDKYGPGSGSGSGSGSGSQVQLVESGGGLVQPGGSLTLSCTASGFTLDHYDIGWFRQAPGKEREGVSCINNSDDDTYYADSVKGRFTIFMNNAKDTVYLQMNSLKPEDTAIYYCAEARGCKRGRYEYDFWGQGTQVTVSS

SEQ ID NO: 1166 - DNA, 762 bp, synthetic construct
  source 1..762: mol_type = other DNA; note = 3DX.1 nucleic acid
gaagtgaaactggtggaaagcggcggcgatctggtgaaaccgggcggcagcctgaaactgagctgcgcggcgagcggctttacctttagccattatggcatgagctgggtgcgccagaccccggataaacgcctggaatgggtggcgaccattggcagccgcggcacctatacccattatccggatagcgtgaaaggccgctttaccattagccgcgataacgataaaaacgcgctgtatctgcagatgaacagcctgcgcaccgaagataccgcgatgtattattgcgcgcgcaaaagcgaattttattattatggcaacacctattattatagcgcgatggattattggggccagggcgcgagcgtgaccgtgagcagcggcggcggcggcagcggcggcggcgatagcggcggcggcggcagcgatattgtgctgacccagagcccggcgagcctggcggtgagcctgggccagcgcgcgaccattagctgccgcgcgagcgaaagcgtggataactatggctttagctttatgaactggtttcagcagaaaccgggccagccgccgaaactgctgatttatgcgaccagcaaccgcggcagcggcgtgccggcgcgctttagcggcagcggcagcggcaccgattttagcctgaacattcatccggtggaagaagatgatagcgcgatgtatttttgccagcagaccaaagaagtgccgtggacctttggcggcggcaccaaactggaaattaaacgc

SEQ ID NO: 1167 - DNA, 762 bp, synthetic construct
  source 1..762: mol_type = other DNA; note = 3DX.2 nucleic acid
gatattgtgctgacccagagcccggcgagcctggcggtgagcctgggccagcgcgcgaccattagctgccgcgcgagcgaaagcgtggataactatggctttagctttatgaactggtttcagcagaaaccgggccagccgccgaaactgctgatttatgcgaccagcaaccgcggcagcggcgtgccggcgcgctttagcggcagcggcagcggcaccgattttagcctgaacattcatccggtggaagaagatgatagcgcgatgtatttttgccagcagaccaaagaagtgccgtggacctttggcggcggcaccaaactggaaattaaacgcggcggcggcggcagcggcggcggcgatagcggcggcggcggcagcgaagtgaaactggtggaaagcggcggcgatctggtgaaaccgggcggcagcctgaaactgagctgcgcggcgagcggctttacctttagccattatggcatgagctgggtgcgccagaccccggataaacgcctggaatgggtggcgaccattggcagccgcggcacctatacccattatccggatagcgtgaaaggccgctttaccattagccgcgataacgataaaaacgcgctgtatctgcagatgaacagcctgcgcaccgaagataccgcgatgtattattgcgcgcgcaaaagcgaattttattattatggcaacacctattattatagcgcgatggattattggggccagggcgcgagcgtgaccgtgagcagc

SEQ ID NO: 1168 - DNA, 276 bp, synthetic construct
  source 1..276: mol_type = other DNA; note = OMOMYC nucleic acid
tctgataccgaggaaaatgtcaagcggagaacccacaacgtgctggaaagacagagacggaatgagctgaagcgctccttcttcgccctgcgggaccagatccccgagctggaaaacaacgagaaggcccctaaggtggtgatcctgaaaaaggctacagcctacatcctgagcgtgcaggccgagacccagaaactgatcagcgagatcgacctgctgagaaagcagaacgagcagctgaagcacaagctggaacaactcagaaacagctgcgcc

SEQ ID NO: 1169 - DNA, 261 bp, synthetic construct
  source 1..261: mol_type = other DNA; note = FOXP3DBD 337-423 nucleic acid
cggccccccttcacctacgccacactgatcagatgggccatcctggaagccccagaaaaacagcgcacccttaacgagatctaccactggttcaccagaatgttcgcctttttccggaaccaccctgccacctggaagaacgccattcggcacaacctgtctctgcacaagtgcttcgtgcgggtcgagagcgagaagggagctgtgtggaccgtggacgagctggagttccggaagaagcggagccaaagaccaagcagg

SEQ ID NO: 1170 - DNA, 342 bp, synthetic construct
  source 1..342: mol_type = other DNA; note = VL12.3 nucleic acid
ggcagccaacctgtgctgacacagagccccagcgtgtccgccgctcctcggcagcgggtgaccatcagcgtgtccggctctaatagcaacatcggctccaacaccgtgaactggatccagcagctgcctggaagagcccccgagctgctgatgtacgacgacgacctgctcgccccaggcgtgtctgatagattcagcggctctagaagcggcaccagcgccagcctgaccatcagcggactgcagtctgaagatgaggccgactactacgccgctacatgggacgatagcctgaacggctgggtgttcggcggcggaacaaaggtgaccgtcctgagcggc

SEQ ID NO: 1171 - DNA, 135 bp, synthetic construct
  source 1..135: mol_type = other DNA; note = TCF4 10-54 nucleic acid
gatgacctaggcgccaacgacgaactgatttccttcaaagacgagggcgaacaggaggagaagagctccgaaaactcctcggcagagagggatttagctgatgtcaaatcgtctctagtcaatgaatcagaaacg

SEQ ID NO: 1172 - DNA, 528 bp, synthetic construct
  source 1..528: mol_type = other DNA; note = CHIP URD (128-303) nucleic acid
cggctgaacttcggggacgacatccccagcgctcttcgaatcgcgaagaagaagcgctggaacagcattgaggagcggcgcatccaccaggagagcgagctgcactcctacctctccaggctcattgccgcggagcgtgagagggagctggaagagtgccagcgaaaccacgagggtgatgaggacgacagccacgtccgggcccagcaggcctgcattgaggccaagcacgacaagtacatggcggacatggacgagcttttttctcaggtggatgagaagaggaagaagcgagacatccccgactacctgtgtggcaagatcagctttgagctgatgcgggagccgtgcatcacgcccagtggcatcacctacgaccgcaaggacatcgaggagcacctgcagcgtgtgggtcattttgacccggtgaccaggagccccctgacccaggaacagctcatccccaacttggctatgaaggaggttattgacgcattcatctctgagaatggctgggtggaggactac

SEQ ID NO: 1173 - DNA, 381 bp, synthetic construct
  source 1..381: mol_type = other DNA; note = RNF125 URD (2-128) nucleic acid
ggctccgtgctgagcaccgacagcggcaaatcggcgcccgcctctgccaccgcgcgggccctggagcgcaggagggacccggagttgcccgtcacgtccttcgactgcgccgtgtgccttgaggtgttacaccagcctgtccggacccgctgcggccacgtattctgccgttcctgtattgctaccagtctgaagaacaacaagtggacctgtccttattgccgggcatatcttccttcagaaggagttccagcaactgatgtagccaaaagaatgaaatcagagtataagaactgcgctgagtgtgacaccctggtttgcctcagtgaaatgagggcacatattcggacttgtcagaagtacatagataagtatggacca

SEQ ID NO: 1174 - DNA, 1068 bp, synthetic construct
  source 1..1068: mol_type = other DNA; note = E6AP URD (520-875) nucleic acid
aatccatatttgagactcaaagttagacgtgaccatatcatagatgatgcacttgtccggctagagatgatcgctatggaaaatcctgcagacttgaagaagcagttgtatgtggaatttgaaggagaacaaggagttgatgagggaggtgtttccaaagaattttttcagctggttgtggaggaaatcttcaatccagatattggtatgttcacatacgatgaatctacaaaattgttttggtttaatccatcttcttttgaaactgagggtcagtttactctgattggcatagtactgggtctggctatttacaataactgtatactggatgtacattttcccatggttgtctacaggaagctaatggggaaaaaaggaacttttcgtgacttgggagactctcacccagttctatatcagagtttaaaagatttattggagtatgaagggaatgtggaagatgacatgatgatcactttccagatatcacagacagatctttttggtaacccaatgatgtatgatctaaaggaaaatggtgataaaattccaattacaaatgaaaacaggaaggaatttgtcaatctttattctgactacattctcaataaatcagtagaaaaacagttcaaggcttttcggagaggttttcatatggtgaccaatgaatctcccttaaagtacttattcagaccagaagaaattgaattgcttatatgtggaagccggaatctagatttccaagcactagaagaaactacagaatatgacggtggctataccagggactctgttctgattagggagttctgggaaatcgttcattcatttacagatgaacagaaaagactcttcttgcagtttacaacgggcacagacagagcacctgtgggaggactaggaaaattaaagatgattatagccaaaaatggcccagacacagaaaggttacctacatctcatacttgctttaatgtgcttttacttccggaatactcaagcaaagaaaaacttaaagagagattgttgaaggccatcacgtatgccaaaggatttggcatgctg

SEQ ID NO: 1175 - DNA, 1101 bp, synthetic construct
  source 1..1101: mol_type = other DNA; note = FBXW7 alpha URD (2-368) W365S nucleic acid
aatcaggaactgctctctgtgggcagcaaaagacgacgaactggaggctctctgagaggtaacccttcctcaagccaggtagatgaagaacagatgaatcgtgtggtagaggaggaacagcaacagcaactcagacaacaagaggaggagcacactgcaaggaatggtgaagttgttggagtagaacctagacctggaggccaaaatgattcccagcaaggacagttggaagaaaacaataatagatttatttcggtagatgaggactcctcaggaaaccaagaagaacaagaggaagatgaagaacatgctggtgaacaagatgaggaggatgaggaggaggaggagatggaccaggagagtgacgattttgatcagtctgatgatagtagcagagaagatgaacatacacatactaacagtgtcacgaactccagtagtattgtggacctgcccgttcaccaactctcctccccattctatacaaaaacaacaaaaatgaaaagaaagttggaccatggttctgaggtccgctctttttctttgggaaagaaaccatgcaaagtctcagaatatacaagtaccactgggcttgtaccatgttcagcaacaccaacaacttttggggacctcagagcagccaatggccaagggcaacaacgacgccgaattacatctgtccagccacctacaggcctccaggaatggctaaaaatgtttcagagctggagtggaccagagaaattgcttgctttagatgaactcattgatagttgtgaaccaacacaagtaaaacatatgatgcaagtgatagaaccccagtttcaacgagacttcatttcattgctccctaaagagttggcactctatgtgctttcattcctggaacccaaagacctgctacaagcagctcagacatgtcgctactggagaattttggctgaagacaaccttctctggagagagaaatgcaaagaagaggggattgatgaaccattgcacatcaagagaagaaaagtaataaaaccaggtttcatacacagtccatggaaaagtgcatacatcagacagcacagaattgatactaactcgaggcgagga

SEQ ID NO: 1176 - DNA, 861 bp, synthetic construct
  source 1..861: mol_type = other DNA; note = FBXW7 beta URD (2-228) W285S nucleic acid
tgtgtcccgagaagcggtttgatactgagctgcatttgcctttactgtggagttttgttgccggttctgctccctaatcttccttttctgacgtgcctgagcatgtccacattagaatctgtgacatacctacctgaaaaaggtttatattgtcagagactgccaagcagccggacacacgggggcacagaatcactgaaggggaaaaatacagaaaatatgggtttctacggcacattaaaaatgattttttacaaaatgaaaagaaagttggaccatggttctgaggtccgctctttttctttgggaaagaaaccatgcaaagtctcagaatatacaagtaccactgggcttgtaccatgttcagcaacaccaacaacttttggggacctcagagcagccaatggccaagggcaacaacgacgccgaattacatctgtccagccacctacaggcctccaggaatggctaaaaatgtttcagagctggagtggaccagagaaattgcttgctttagatgaactcattgatagttgtgaaccaacacaagtaaaacatatgatgcaagtgatagaaccccagtttcaacgagacttcatttcattgctccctaaagagttggcactctatgtgctttcattcctggaacccaaagacctgctacaagcagctcagacatgtcgctactggagaattttggctgaagacaaccttctctggagagagaaatgcaaagaagaggggattgatgaaccattgcacatcaagagaagaaaagtaataaaaccaggtttcatacacagtccatggaaaagtgcatacatcagacagcacagaattgatactaactcgaggcgagga

SEQ ID NO: 1177 - DNA, 963 bp, synthetic construct
  source 1..963: mol_type = other DNA; note = Keap1 URD (2-322) nucleic acid
cagccagatcccaggcctagcggggctggggcctgctgccgattcctgcccctgcagtcacagtgccctgagggggcaggggacgcggtgatgtacgcctccactgagtgcaaggcggaggtgacgccctcccagcatggcaaccgcaccttcagctacaccctggaggatcataccaagcaggcctttggcatcatgaacgagctgcggctcagccagcagctgtgtgacgtcacactgcaggtcaagtaccaggatgcaccggccgcccagttcatggcccacaaggtggtgctggcctcatccagccctgtcttcaaggccatgttcaccaacgggctgcgggagcagggcatggaggtggtgtccattgagggtatccaccccaaggtcatggagcgcctcattgaattcgcctacacggcctccatctccatgggcgagaagtgtgtcctccacgtcatgaacggtgctgtcatgtaccagatcgacagcgttgtccgtgcctgcagtgacttcctggtgcagcagctggaccccagcaatgccatcggcatcgccaacttcgctgagcagattggctgtgtggagttgcaccagcgtgcccgggagtacatctacatgcattttggggaggtggccaagcaagaggagttcttcaacctgtcccactgccaactggtgaccctcatcagccgggacgacctgaacgtgcgctgcgagtccgaggtcttccacgcctgcatcaactgggtcaagtacgactgcgaacagcgacggttctacgtccaggcgctgctgcgggccgtgcgctgccactcgttgacgccgaacttcctgcagatgcagctgcagaagtgcgagatcctgcagtccgactcccgctgcaaggactacctggtcaagatcttcgaggagctcaccctgcacaagcccacgcaggtgatgccctgccgggcgccc

SEQ ID NO: 1178 - DNA, 684 bp, synthetic construct
  source 1..684: mol_type = other DNA; note = SPOP URD (147-374) nucleic acid
aacgggcttctccctgatgacaagcttaccctcttctgcgaggtgagtgttgtgcaagattctgtcaacatttctggccagaataccatgaacatggtaaaggttcctgagtgccggctggcagatgagttaggaggactgtgggagaattcccggttcacagactgctgcttgtgtgttgccggccaggaattccaggctcacaaggctatcttagcagctcgttctccggtttttagtgccatgtttgaacatgaaatggaggagagcaaaaagaatcgagttgaaatcaatgatgtggagcctgaagtttttaaggaaatgatgtgcttcatttacacggggaaggctccaaacctcgacaaaatggctgatgatttgctggcagctgctgacaagtatgccctggagcgcttaaaggtcatgtgtgaggatgccctctgcagtaacctgtccgtggagaacgctgcagaaattctcatcctggccgacctccacagtgcagatcagttgaaaactcaggcagtggatttcatcaactatcatgcttcggatgtcttggagacctctgggtggaagtcaatggtggtgtcacatccccacttggtggctgaggcataccgctctctggcttcagcacagtgcccttttctgggacccccacgcaaacgcctgaagcaatcc

SEQ ID NO: 1179 - DNA, 105 bp, synthetic construct
  source 1..105: mol_type = other DNA; note = DCAF1 truncated URD (1045-1079) nucleic acid
caggcgccgattaactttaccagccgcctgaaccgccgcgcgagctttccgaaatatggcggcgtggatggcggctgctttgatcgccatctgatttttagccgc

SEQ ID NO: 1180 - skipped

SEQ ID NO: 1181 - DNA, 12 bp, synthetic construct
  source 1..12: mol_type = other DNA; note = 2xGS linker nucleic acid
ggcagcggcagc

SEQ ID NO: 1182 - DNA, 18 bp, synthetic construct
  source 1..18: mol_type = other DNA; note = 3xGS linker nucleic acid
ggcagcggcagcggcagc

SEQ ID NO: 1183 - DNA, 24 bp, synthetic construct
  source 1..24: mol_type = other DNA; note = 4xGS linker nucleic acid
ggcagcggcagcggcagcggcagc

SEQ ID NO: 1184 - DNA, 30 bp, synthetic construct
  source 1..30: mol_type = other DNA; note = 5xGS linker nucleic acid
ggcagcggcagcggcagcggcagcggcagc

SEQ ID NO: 1185 - DNA, 36 bp, synthetic construct
  source 1..36: mol_type = other DNA; note = 6xGS linker nucleic acid
ggcagcggcagcggcagcggcagcggcagcggcagc

SEQ ID NO: 1186 - DNA, 27 bp, synthetic construct
  source 1..27: mol_type = other DNA; note = HA epitope tag nucleic acid
tacccatacgatgttccagattacgct

SEQ ID NO: 1187 - DNA, 27 bp, synthetic construct
  source 1..27: mol_type = other DNA; note = nuclear localization signal (NLS) nucleic acid
ccggcggcgaaacgcgtgaaactggat

SEQ ID NO: 1188 - DNA, 1338 bp, synthetic construct
  source 1..1338: mol_type = other DNA; note = 3DX.1-(GS)1-CHIP-NLS nucleic acid
atggaagtgaaactggtggaaagcggcggcgatctggtgaaaccgggcggcagcctgaaactgagctgcgcggcgagcggctttacctttagccattatggcatgagctgggtgcgccagaccccggataaacgcctggaatgggtggcgaccattggcagccgcggcacctatacccattatccggatagcgtgaaaggccgctttaccattagccgcgataacgataaaaacgcgctgtatctgcagatgaacagcctgcgcaccgaagataccgcgatgtattattgcgcgcgcaaaagcgaattttattattatggcaacacctattattatagcgcgatggattattggggccagggcgcgagcgtgaccgtgagcagcggcggcggcggcagcggcggcggcgatagcggcggcggcggcagcgatattgtgctgacccagagcccggcgagcctggcggtgagcctgggccagcgcgcgaccattagctgccgcgcgagcgaaagcgtggataactatggctttagctttatgaactggtttcagcagaaaccgggccagccgccgaaactgctgatttatgcgaccagcaaccgcggcagcggcgtgccggcgcgctttagcggcagcggcagcggcaccgattttagcctgaacattcatccggtggaagaagatgatagcgcgatgtatttttgccagcagaccaaagaagtgccgtggacctttggcggcggcaccaaactggaaattaaacgcggcagccggctgaacttcggggacgacatccccagcgctcttcgaatcgcgaagaagaagcgctggaacagcattgaggagcggcgcatccaccaggagagcgagctgcactcctacctctccaggctcattgccgcggagcgtgagagggagctggaagagtgccagcgaaaccacgagggtgatgaggacgacagccacgtccgggcccagcaggcctgcattgaggccaagcacgacaagtacatggcggacatggacgagcttttttctcaggtggatgagaagaggaagaagcgagacatccccgactacctgtgtggcaagatcagctttgagctgatgcgggagccgtgcatcacgcccagtggcatcacctacgaccgcaaggacatcgaggagcacctgcagcgtgtgggtcattttgacccggtgaccaggagccccctgacccaggaacagctcatccccaacttggctatgaaggaggttattgacgcattcatctctgagaatggctgggtggaggactacggcagcggcagcccggcggcgaaacgcgtgaaactggat

SEQ ID NO: 1189 - DNA, 1344 bp, synthetic construct
  source 1..1344: mol_type = other DNA; note = 3DX.1-(GS)2-CHIP-NLS nucleic acid
atggaagtgaaactggtggaaagcggcggcgatctggtgaaaccgggcggcagcctgaaactgagctgcgcggcgagcggctttacctttagccattatggcatgagctgggtgcgccagaccccggataaacgcctggaatgggtggcgaccattggcagccgcggcacctatacccattatccggatagcgtgaaaggccgctttaccattagccgcgataacgataaaaacgcgctgtatctgcagatgaacagcctgcgcaccgaagataccgcgatgtattattgcgcgcgcaaaagcgaattttattattatggcaacacctattattatagcgcgatggattattggggccagggcgcgagcgtgaccgtgagcagcggcggcggcggcagcggcggcggcgatagcggcggcggcggcagcgatattgtgctgacccagagcccggcgagcctggcggtgagcctgggccagcgcgcgaccattagctgccgcgcgagcgaaagcgtggataactatggctttagctttatgaactggtttcagcagaaaccgggccagccgccgaaactgctgatttatgcgaccagcaaccgcggcagcggcgtgccggcgcgctttagcggcagcggcagcggcaccgattttagcctgaacattcatccggtggaagaagatgatagcgcgatgtatttttgccagcagaccaaagaagtgccgtggacctttggcggcggcaccaaactggaaattaaacgcggcagcggcagccggctgaacttcggggacgacatccccagcgctcttcgaatcgcgaagaagaagcgctggaacagcattgaggagcggcgcatccaccaggagagcgagctgcactcctacctctccaggctcattgccgcggagcgtgagagggagctggaagagtgccagcgaaaccacgagggtgatgaggacgacagccacgtccgggcccagcaggcctgcattgaggccaagcacgacaagtacatggcggacatggacgagcttttttctcaggtggatgagaagaggaagaagcgagacatccccgactacctgtgtggcaagatcagctttgagctgatgcgggagccgtgcatcacgcccagtggcatcacctacgaccgcaaggacatcgaggagcacctgcagcgtgtgggtcattttgacccggtgaccaggagccccctgacccaggaacagctcatccccaacttggctatgaaggaggttattgacgcattcatctctgagaatggctgggtggaggactacggcagcggcagcccggcggcgaaacgcgtgaaactggat

SEQ ID NO: 1190 - DNA, 1350 bp, synthetic construct
  source 1..1350: mol_type = other DNA; note = 3DX.1-(GS)3-CHIP-NLS nucleic acid
atggaagtgaaactggtggaaagcggcggcgatctggtgaaaccgggcggcagcctgaaactgagctgcgcggcgagcggctttacctttagccattatggcatgagctgggtgcgccagaccccggataaacgcctggaatgggtggcgaccattggcagccgcggcacctatacccattatccggatagcgtgaaaggccgctttaccattagccgcgataacgataaaaacgcgctgtatctgcagatgaacagcctgcgcaccgaagataccgcgatgtattattgcgcgcgcaaaagcgaattttattattatggcaacacctattattatagcgcgatggattattggggccagggcgcgagcgtgaccgtgagcagcggcggcggcggcagcggcggcggcgatagcggcggcggcggcagcgatattgtgctgacccagagcccggcgagcctggcggtgagcctgggccagcgcgcgaccattagctgccgcgcgagcgaaagcgtggataactatggctttagctttatgaactggtttcagcagaaaccgggccagccgccgaaactgctgatttatgcgaccagcaaccgcggcagcggcgtgccggcgcgctttagcggcagcggcagcggcaccgattttagcctgaacattcatccggtggaagaagatgatagcgcgatgtatttttgccagcagaccaaagaagtgccgtggacctttggcggcggcaccaaactggaaattaaacgcggcagcggcagcggcagccggctgaacttcggggacgacatccccagcgctcttcgaatcgcgaagaagaagcgctggaacagcattgaggagcggcgcatccaccaggagagcgagctgcactcctacctctccaggctcattgccgcggagcgtgagagggagctggaagagtgccagcgaaaccacgagggtgatgaggacgacagccacgtccgggcccagcaggcctgcattgaggccaagcacgacaagtacatggcggacatggacgagcttttttctcaggtggatgagaagaggaagaagcgagacatccccgactacctgtgtggcaagatcagctttgagctgatgcgggagccgtgcatcacgcccagtggcatcacctacgaccgcaaggacatcgaggagcacctgcagcgtgtgggtcattttgacccggtgaccaggagccccctgacccaggaacagctcatccccaacttggctatgaaggaggttattgacgcattcatctctgagaatggctgggtggaggactacggcagcggcagcccggcggcgaaacgcgtgaaactggat

SEQ ID NO: 1191 - DNA, 1356 bp, synthetic construct
  source 1..1356: mol_type = other DNA; note = 3DX.1-(GS)4-CHIP-NLS nucleic acid
atggaagtgaaactggtggaaagcggcggcgatctggtgaaaccgggcggcagcctgaaactgagctgcgcggcgagcggctttacctttagccattatggcatgagctgggtgcgccagaccccggataaacgcctggaatgggtggcgaccattggcagccgcggcacctatacccattatccggatagcgtgaaaggccgctttaccattagccgcgataacgataaaaacgcgctgtatctgcagatgaacagcctgcgcaccgaagataccgcgatgtattattgcgcgcgcaaaagcgaattttattattatggcaacacctattattatagcgcgatggattattggggccagggcgcgagcgtgaccgtgagcagcggcggcggcggcagcggcggcggcgatagcggcggcggcggcagcgatattgtgctgacccagagcccggcgagcctggcggtgagcctgggccagcgcgcgaccattagctgccgcgcgagcgaaagcgtggataactatggctttagctttatgaactggtttcagcagaaaccgggccagccgccgaaactgctgatttatgcgaccagcaaccgcggcagcggcgtgccggcgcgctttagcggcagcggcagcggcaccgattttagcctgaacattcatccggtggaagaagatgatagcgcgatgtatttttgccagcagaccaaagaagtgccgtggacctttggcggcggcaccaaactggaaattaaacgcggcagcggcagcggcagcggcagccggctgaacttcggggacgacatccccagcgctcttcgaatcgcgaagaagaagcgctggaacagcattgaggagcggcgcatccaccaggagagcgagctgcactcctacctctccaggctcattgccgcggagcgtgagagggagctggaagagtgccagcgaaaccacgagggtgatgaggacgacagccacgtccgggcccagcaggcctgcattgaggccaagcacgacaagtacatggcggacatggacgagcttttttctcaggtggatgagaagaggaagaagcgagacatccccgactacctgtgtggcaagatcagctttgagctgatgcgggagccgtgcatcacgcccagtggcatcacctacgaccgcaaggacatcgaggagcacctgcagcgtgtgggtcattttgacccggtgaccaggagccccctgacccaggaacagctcatccccaacttggctatgaaggaggttattgacgcattcatctctgagaatggctgggtggaggactacggcagcggcagcccggcggcgaaacgcgtgaaactggat

SEQ ID NO: 1192 - DNA, 1362 bp, synthetic construct
  source 1..1362: mol_type = other DNA; note = 3DX.1-(GS)5-CHIP-NLS nucleic acid
atggaagtgaaactggtggaaagcggcggcgatctggtgaaaccgggcggcagcctgaaactgagctgcgcggcgagcggctttacctttagccattatggcatgagctgggtgcgccagaccccggataaacgcctggaatgggtggcgaccattggcagccgcggcacctatacccattatccggatagcgtgaaaggccgctttaccattagccgcgataacgataaaaacgcgctgtatctgcagatgaacagcctgcgcaccgaagataccgcgatgtattattgcgcgcgcaaaagcgaattttattattatggcaacacctattattatagcgcgatggattattggggccagggcgcgagcgtgaccgtgagcagcggcggcggcggcagcggcggcggcgatagcggcggcggcggcagcgatattgtgctgacccagagcccggcgagcctggcggtgagcctgggccagcgcgcgaccattagctgccgcgcgagcgaaagcgtggataactatggctttagctttatgaactggtttcagcagaaaccgggccagccgccgaaactgctgatttatgcgaccagcaaccgcggcagcggcgtgccggcgcgctttagcggcagcggcagcggcaccgattttagcctgaacattcatccggtggaagaagatgatagcgcgatgtatttttgccagcagaccaaagaagtgccgtggacctttggcggcggcaccaaactggaaattaaacgcggcagcggcagcggcagcggcagcggcagccggctgaacttcggggacgacatccccagcgctcttcgaatcgcgaagaagaagcgctggaacagcattgaggagcggcgcatccaccaggagagcgagctgcactcctacctctccaggctcattgccgcggagcgtgagagggagctggaagagtgccagcgaaaccacgagggtgatgaggacgacagccacgtccgggcccagcaggcctgcattgaggccaagcacgacaagtacatggcggacatggacgagcttttttctcaggtggatgagaagaggaagaagcgagacatccccgactacctgtgtggcaagatcagctttgagctgatgcgggagccgtgcatcacgcccagtggcatcacctacgaccgcaaggacatcgaggagcacctgcagcgtgtgggtcattttgacccggtgaccaggagccccctgacccaggaacagctcatccccaacttggctatgaaggaggttattgacgcattcatctctgagaatggctgggtggaggactacggcagcggcagcccggcggcgaaacgcgtgaaactggat

SEQ ID NO: 1193 - DNA, 1368 bp, synthetic construct
  source 1..1368: mol_type = other DNA; note = 3DX.1-(GS)6-CHIP-NLS nucleic acid
atggaagtgaaactggtggaaagcggcggcgatctggtgaaaccgggcggcagcctgaaactgagctgcgcggcgagcggctttacctttagccattatggcatgagctgggtgcgccagaccccggataaacgcctggaatgggtggcgaccattggcagccgcggcacctatacccattatccggatagcgtgaaaggccgctttaccattagccgcgataacgataaaaacgcgctgtatctgcagatgaacagcctgcgcaccgaagataccgcgatgtattattgcgcgcgcaaaagcgaattttattattatggcaacacctattattatagcgcgatggattattggggccagggcgcgagcgtgaccgtgagcagcggcggcggcggcagcggcggcggcgatagcggcggcggcggcagcgatattgtgctgacccagagcccggcgagcctggcggtgagcctgggccagcgcgcgaccattagctgccgcgcgagcgaaagcgtggataactatggctttagctttatgaactggtttcagcagaaaccgggccagccgccgaaactgctgatttatgcgaccagcaaccgcggcagcggcgtgccggcgcgctttagcggcagcggcagcggcaccgattttagcctgaacattcatccggtggaagaagatgatagcgcgatgtatttttgccagcagaccaaagaagtgccgtggacctttggcggcggcaccaaactggaaattaaacgcggcagcggcagcggcagcggcagcggcagcggcagccggctgaacttcggggacgacatccccagcgctcttcgaatcgcgaagaagaagcgctggaacagcattgaggagcggcgcatccaccaggagagcgagctgcactcctacctctccaggctcattgccgcggagcgtgagagggagctggaagagtgccagcgaaaccacgagggtgatgaggacgacagccacgtccgggcccagcaggcctgcattgaggccaagcacgacaagtacatggcggacatggacgagcttttttctcaggtggatgagaagaggaagaagcgagacatccccgactacctgtgtggcaagatcagctttgagctgatgcgggagccgtgcatcacgcccagtggcatcacctacgaccgcaaggacatcgaggagcacctgcagcgtgtgggtcattttgacccggtgaccaggagccccctgacccaggaacagctcatccccaacttggctatgaaggaggttattgacgcattcatctctgagaatggctgggtggaggactacggcagcggcagcccggcggcgaaacgcgtgaaactggat

SEQ ID NO: 1194 - DNA, 1368 bp, synthetic construct
  source 1..1368: mol_type = other DNA; note = 3DX.1-(GS)1-CHIP-NLS-HA nucleic acid
atggaagtgaaactggtggaaagcggcggcgatctggtgaaaccgggcggcagcctgaaactgagctgcgcggcgagcggctttacctttagccattatggcatgagctgggtgcgccagaccccggataaacgcctggaatgggtggcgaccattggcagccgcggcacctatacccattatccggatagcgtgaaaggccgctttaccattagccgcgataacgataaaaacgcgctgtatctgcagatgaacagcctgcgcaccgaagataccgcgatgtattattgcgcgcgcaaaagcgaattttattattatggcaacacctattattatagcgcgatggattattggggccagggcgcgagcgtgaccgtgagcagcggcggcggcggcagcggcggcggcgatagcggcggcggcggcagcgatattgtgctgacccagagcccggcgagcctggcggtgagcctgggccagcgcgcgaccattagctgccgcgcgagcgaaagcgtggataactatggctttagctttatgaactggtttcagcagaaaccgggccagccgccgaaactgctgatttatgcgaccagcaaccgcggcagcggcgtgccggcgcgctttagcggcagcggcagcggcaccgattttagcctgaacattcatccggtggaagaagatgatagcgcgatgtatttttgccagcagaccaaagaagtgccgtggacctttggcggcggcaccaaactggaaattaaacgcggcagccggctgaacttcggggacgacatccccagcgctcttcgaatcgcgaagaagaagcgctggaacagcattgaggagcggcgcatccaccaggagagcgagctgcactcctacctctccaggctcattgccgcggagcgtgagagggagctggaagagtgccagcgaaaccacgagggtgatgaggacgacagccacgtccgggcccagcaggcctgcattgaggccaagcacgacaagtacatggcggacatggacgagcttttttctcaggtggatgagaagaggaagaagcgagacatccccgactacctgtgtggcaagatcagctttgagctgatgcgggagccgtgcatcacgcccagtggcatcacctacgaccgcaaggacatcgaggagcacctgcagcgtgtgggtcattttgacccggtgaccaggagccccctgacccaggaacagctcatccccaacttggctatgaaggaggttattgacgcattcatctctgagaatggctgggtggaggactacggcagcggcagcccggcggcgaaacgcgtgaaactggattacccatacgatgttccagattacgcttaa

SEQ ID NO: 1195 - DNA, 1374 bp, synthetic construct
  source 1..1374: mol_type = other DNA; note = 3DX.1-(GS)2-CHIP-NLS-HA nucleic acid
atggaagtgaaactggtggaaagcggcggcgatctggtgaaaccgggcggcagcctgaaactgagctgcgcggcgagcggctttacctttagccattatggcatgagctgggtgcgccagaccccggataaacgcctggaatgggtggcgaccattggcagccgcggcacctatacccattatccggatagcgtgaaaggccgctttaccattagccgcgataacgataaaaacgcgctgtatctgcagatgaacagcctgcgcaccgaagataccgcgatgtattattgcgcgcgcaaaagcgaattttattattatggcaacacctattattatagcgcgatggattattggggccagggcgcgagcgtgaccgtgagcagcggcggcggcggcagcggcggcggcgatagcggcggcggcggcagcgatattgtgctgacccagagcccggcgagcctggcggtgagcctgggccagcgcgcgaccattagctgccgcgcgagcgaaagcgtggataactatggctttagctttatgaactggtttcagcagaaaccgggccagccgccgaaactgctgatttatgcgaccagcaaccgcggcagcggcgtgccggcgcgctttagcggcagcggcagcggcaccgattttagcctgaacattcatccggtggaagaagatgatagcgcgatgtatttttgccagcagaccaaagaagtgccgtggacctttggcggcggcaccaaactggaaattaaacgcggcagcggcagccggctgaacttcggggacgacatccccagcgctcttcgaatcgcgaagaagaagcgctggaacagcattgaggagcggcgcatccaccaggagagcgagctgcactcctacctctccaggctcattgccgcggagcgtgagagggagctggaagagtgccagcgaaaccacgagggtgatgaggacgacagccacgtccgggcccagcaggcctgcattgaggccaagcacgacaagtacatggcggacatggacgagcttttttctcaggtggatgagaagaggaagaagcgagacatccccgactacctgtgtggcaagatcagctttgagctgatgcgggagccgtgcatcacgcccagtggcatcacctacgaccgcaaggacatcgaggagcacctgcagcgtgtgggtcattttgacccggtgaccaggagccccctgacccaggaacagctcatccccaacttggctatgaaggaggttattgacgcattcatctctgagaatggctgggtggaggactacggcagcggcagcccggcggcgaaacgcgtgaaactggattacccatacgatgttccagattacgcttaa

SEQ ID NO: 1196 - DNA, 1380 bp, synthetic construct
  source 1..1380: mol_type = other DNA; note = 3DX.1-(GS)3-CHIP-NLS-HA nucleic acid
atggaagtgaaactggtggaaagcggcggcgatctggtgaaaccgggcggcagcctgaaactgagctgcgcggcgagcggctttacctttagccattatggcatgagctgggtgcgccagaccccggataaacgcctggaatgggtggcgaccattggcagccgcggcacctatacccattatccggatagcgtgaaaggccgctttaccattagccgcgataacgataaaaacgcgctgtatctgcagatgaacagcctgcgcaccgaagataccgcgatgtattattgcgcgcgcaaaagcgaattttattattatggcaacacctattattatagcgcgatggattattggggccagggcgcgagcgtgaccgtgagcagcggcggcggcggcagcggcggcggcgatagcggcggcggcggcagcgatattgtgctgacccagagcccggcgagcctggcggtgagcctgggccagcgcgcgaccattagctgccgcgcgagcgaaagcgtggataactatggctttagctttatgaactggtttcagcagaaaccgggccagccgccgaaactgctgatttatgcgaccagcaaccgcggcagcggcgtgccggcgcgctttagcggcagcggcagcggcaccgattttagcctgaacattcatccggtggaagaagatgatagcgcgatgtatttttgccagcagaccaaagaagtgccgtggacctttggcggcggcaccaaactggaaattaaacgcggcagcggcagcggcagccggctgaacttcggggacgacatccccagcgctcttcgaatcgcgaagaagaagcgctggaacagcattgaggagcggcgcatccaccaggagagcgagctgcactcctacctctccaggctcattgccgcggagcgtgagagggagctggaagagtgccagcgaaaccacgagggtgatgaggacgacagccacgtccgggcccagcaggcctgcattgaggccaagcacgacaagtacatggcggacatggacgagcttttttctcaggtggatgagaagaggaagaagcgagacatccccgactacctgtgtggcaagatcagctttgagctgatgcgggagccgtgcatcacgcccagtggcatcacctacgaccgcaaggacatcgaggagcacctgcagcgtgtgggtcattttgacccggtgaccaggagccccctgacccaggaacagctcatccccaacttggctatgaaggaggttattgacgcattcatctctgagaatggctgggtggaggactacggcagcggcagcccggcggcgaaacgcgtgaaactggattacccatacgatgttccagattacgcttaa

SEQ ID NO: 1197 - DNA, 1386 bp, synthetic construct
  source 1..1386: mol_type = other DNA; note = 3DX.1-(GS)4-CHIP-NLS-HA nucleic acid
atggaagtgaaactggtggaaagcggcggcgatctggtgaaaccgggcggcagcctgaaactgagctgcgcggcgagcggctttacctttagccattatggcatgagctgggtgcgccagaccccggataaacgcctggaatgggtggcgaccattggcagccgcggcacctatacccattatccggatagcgtgaaaggccgctttaccattagccgcgataacgataaaaacgcgctgtatctgcagatgaacagcctgcgcaccgaagataccgcgatgtattattgcgcgcgcaaaagcgaattttattattatggcaacacctattattatagcgcgatggattattggggccagggcgcgagcgtgaccgtgagcagcggcggcggcggcagcggcggcggcgatagcggcggcggcggcagcgatattgtgctgacccagagcccggcgagcctggcggtgagcctgggccagcgcgcgaccattagctgccgcgcgagcgaaagcgtggataactatggctttagctttatgaactggtttcagcagaaaccgggccagccgccgaaactgctgatttatgcgaccagcaaccgcggcagcggcgtgccggcgcgctttagcggcagcggcagcggcaccgattttagcctgaacattcatccggtggaagaagatgatagcgcgatgtatttttgccagcagaccaaagaagtgccgtggacctttggcggcggcaccaaactggaaattaaacgcggcagcggcagcggcagcggcagccggctgaacttcggggacgacatccccagcgctcttcgaatcgcgaagaagaagcgctggaacagcattgaggagcggcgcatccaccaggagagcgagctgcactcctacctctccaggctcattgccgcggagcgtgagagggagctggaagagtgccagcgaaaccacgagggtgatgaggacgacagccacgtccgggcccagcaggcctgcattgaggccaagcacgacaagtacatggcggacatggacgagcttttttctcaggtggatgagaagaggaagaagcgagacatccccgactacctgtgtggcaagatcagctttgagctgatgcgggagccgtgcatcacgcccagtggcatcacctacgaccgcaaggacatcgaggagcacctgcagcgtgtgggtcattttgacccggtgaccaggagccccctgacccaggaacagctcatccccaacttggctatgaaggaggttattgacgcattcatctctgagaatggctgggtggaggactacggcagcggcagcccggcggcgaaacgcgtgaaactggattacccatacgatgttccagattacgcttaa

SEQ ID NO: 1198 - DNA, 1392 bp, synthetic construct
  source 1..1392: mol_type = other DNA; note = 3DX.1-(GS)5-CHIP-NLS-HA nucleic acid
atggaagtgaaactggtggaaagcggcggcgatctggtgaaaccgggcggcagcctgaaactgagctgcgcggcgagcggctttacctttagccattatggcatgagctgggtgcgccagaccccggataaacgcctggaatgggtggcgaccattggcagccgcggcacctatacccattatccggatagcgtgaaaggccgctttaccattagccgcgataacgataaaaacgcgctgtatctgcagatgaacagcctgcgcaccgaagataccgcgatgtattattgcgcgcgcaaaagcgaattttattattatggcaacacctattattatagcgcgatggattattggggccagggcgcgagcgtgaccgtgagcagcggcggcggcggcagcggcggcggcgatagcggcggcggcggcagcgatattgtgctgacccagagcccggcgagcctggcggtgagcctgggccagcgcgcgaccattagctgccgcgcgagcgaaagcgtggataactatggctttagctttatgaactggtttcagcagaaaccgggccagccgccgaaactgctgatttatgcgaccagcaaccgcggcagcggcgtgccggcgcgctttagcggcagcggcagcggcaccgattttagcctgaacattcatccggtggaagaagatgatagcgcgatgtatttttgccagcagaccaaagaagtgccgtggacctttggcggcggcaccaaactggaaattaaacgcggcagcggcagcggcagcggcagcggcagccggctgaacttcggggacgacatccccagcgctcttcgaatcgcgaagaagaagcgctggaacagcattgaggagcggcgcatccaccaggagagcgagctgcactcctacctctccaggctcattgccgcggagcgtgagagggagctggaagagtgccagcgaaaccacgagggtgatgaggacgacagccacgtccgggcccagcaggcctgcattgaggccaagcacgacaagtacatggcggacatggacgagcttttttctcaggtggatgagaagaggaagaagcgagacatccccgactacctgtgtggcaagatcagctttgagctgatgcgggagccgtgcatcacgcccagtggcatcacctacgaccgcaaggacatcgaggagcacctgcagcgtgtgggtcattttgacccggtgaccaggagccccctgacccaggaacagctcatccccaacttggctatgaaggaggttattgacgcattcatctctgagaatggctgggtggaggactacggcagcggcagcccggcggcgaaacgcgtgaaactggattacccatacgatgttccagattacgcttaa

SEQ ID NO: 1199 - DNA, 1398 bp, synthetic construct
  source 1..1398: mol_type = other DNA; note = 3DX.1-(GS)6-CHIP-NLS-HA nucleic acid
atggaagtgaaactggtggaaagcggcggcgatctggtgaaaccgggcggcagcctgaaactgagctgcgcggcgagcggctttacctttagccattatggcatgagctgggtgcgccagaccccggataaacgcctggaatgggtggcgaccattggcagccgcggcacctatacccattatccggatagcgtgaaaggccgctttaccattagccgcgataacgataaaaacgcgctgtatctgcagatgaacagcctgcgcaccgaagataccgcgatgtattattgcgcgcgcaaaagcgaattttattattatggcaacacctattattatagcgcgatggattattggggccagggcgcgagcgtgaccgtgagcagcggcggcggcggcagcggcggcggcgatagcggcggcggcggcagcgatattgtgctgacccagagcccggcgagcctggcggtgagcctgggccagcgcgcgaccattagctgccgcgcgagcgaaagcgtggataactatggctttagctttatgaactggtttcagcagaaaccgggccagccgccgaaactgctgatttatgcgaccagcaaccgcggcagcggcgtgccggcgcgctttagcggcagcggcagcggcaccgattttagcctgaacattcatccggtggaagaagatgatagcgcgatgtatttttgccagcagaccaaagaagtgccgtggacctttggcggcggcaccaaactggaaattaaacgcggcagcggcagcggcagcggcagcggcagcggcagccggctgaacttcggggacgacatccccagcgctcttcgaatcgcgaagaagaagcgctggaacagcattgaggagcggcgcatccaccaggagagcgagctgcactcctacctctccaggctcattgccgcggagcgtgagagggagctggaagagtgccagcgaaaccacgagggtgatgaggacgacagccacgtccgggcccagcaggcctgcattgaggccaagcacgacaagtacatggcggacatggacgagcttttttctcaggtggatgagaagaggaagaagcgagacatccccgactacctgtgtggcaagatcagctttgagctgatgcgggagccgtgcatcacgcccagtggcatcacctacgaccgcaaggacatcgaggagcacctgcagcgtgtgggtcattttgacccggtgaccaggagccccctgacccaggaacagctcatccccaacttggctatgaaggaggttattgacgcattcatctctgagaatggctgggtggaggactacggcagcggcagcccggcggcgaaacgcgtgaaactggattacccatacgatgttccagattacgcttaa

SEQ ID NO: 1200 - DNA, 921 bp, synthetic construct
  source 1..921: mol_type = other DNA; note = NLS-DCAF1-(GS)1-3DX.1 nucleic acid
ccggcggcgaaacgcgtgaaactggatggcagcggcagcggcagccaggcgccgattaactttaccagccgcctgaaccgccgcgcgagctttccgaaatatggcggcgtggatggcggctgctttgatcgccatctgatttttagccgcggcagcgaagtgaaactggtggaaagcggcggcgatctggtgaaaccgggcggcagcctgaaactgagctgcgcggcgagcggctttacctttagccattatggcatgagctgggtgcgccagaccccggataaacgcctggaatgggtggcgaccattggcagccgcggcacctatacccattatccggatagcgtgaaaggccgctttaccattagccgcgataacgataaaaacgcgctgtatctgcagatgaacagcctgcgcaccgaagataccgcgatgtattattgcgcgcgcaaaagcgaattttattattatggcaacacctattattatagcgcgatggattattggggccagggcgcgagcgtgaccgtgagcagcggcggcggcggcagcggcggcggcgatagcggcggcggcggcagcgatattgtgctgacccagagcccggcgagcctggcggtgagcctgggccagcgcgcgaccattagctgccgcgcgagcgaaagcgtggataactatggctttagctttatgaactggtttcagcagaaaccgggccagccgccgaaactgctgatttatgcgaccagcaaccgcggcagcggcgtgccggcgcgctttagcggcagcggcagcggcaccgattttagcctgaacattcatccggtggaagaagatgatagcgcgatgtatttttgccagcagaccaaagaagtgccgtggacctttggcggcggcaccaaactggaaattaaacgctaa

SEQ ID NO: 1201 - DNA, 927 bp, synthetic construct
  source 1..927: mol_type = other DNA; note = NLS-DCAF1-(GS)2-3DX.1 nucleic acid
ccggcggcgaaacgcgtgaaactggatggcagcggcagcggcagccaggcgccgattaactttaccagccgcctgaaccgccgcgcgagctttccgaaatatggcggcgtggatggcggctgctttgatcgccatctgatttttagccgcggcagcggcagcgaagtgaaactggtggaaagcggcggcgatctggtgaaaccgggcggcagcctgaaactgagctgcgcggcgagcggctttacctttagccattatggcatgagctgggtgcgccagaccccggataaacgcctggaatgggtggcgaccattggcagccgcggcacctatacccattatccggatagcgtgaaaggccgctttaccattagccgcgataacgataaaaacgcgctgtatctgcagatgaacagcctgcgcaccgaagataccgcgatgtattattgcgcgcgcaaaagcgaattttattattatggcaacacctattattatagcgcgatggattattggggccagggcgcgagcgtgaccgtgagcagcggcggcggcggcagcggcggcggcgatagcggcggcggcggcagcgatattgtgctgacccagagcccggcgagcctggcggtgagcctgggccagcgcgcgaccattagctgccgcgcgagcgaaagcgtggataactatggctttagctttatgaactggtttcagcagaaaccgggccagccgccgaaactgctgatttatgcgaccagcaaccgcggcagcggcgtgccggcgcgctttagcggcagcggcagcggcaccgattttagcctgaacattcatccggtggaagaagatgatagcgcgatgtatttttgccagcagaccaaagaagtgccgtggacctttggcggcggcaccaaactggaaattaaacgctaa

SEQ ID NO: 1202 - DNA, 933 bp, synthetic construct
  source 1..933: mol_type = other DNA; note = NLS-DCAF1-(GS)3-3DX.1 nucleic acid
ccggcggcgaaacgcgtgaaactggatggcagcggcagcggcagccaggcgccgattaactttaccagccgcctgaaccgccgcgcgagctttccgaaatatggcggcgtggatggcggctgctttgatcgccatctgatttttagccgcggcagcggcagcggcagcgaagtgaaactggtggaaagcggcggcgatctggtgaaaccgggcggcagcctgaaactgagctgcgcggcgagcggctttacctttagccattatggcatgagctgggtgcgccagaccccggataaacgcctggaatgggtggcgaccattggcagccgcggcacctatacccattatccggatagcgtgaaaggccgctttaccattagccgcgataacgataaaaacgcgctgtatctgcagatgaacagcctgcgcaccgaagataccgcgatgtattattgcgcgcgcaaaagcgaattttattattatggcaacacctattattatagcgcgatggattattggggccagggcgcgagcgtgaccgtgagcagcggcggcggcggcagcggcggcggcgatagcggcggcggcggcagcgatattgtgctgacccagagcccggcgagcctggcggtgagcctgggccagcgcgcgaccattagctgccgcgcgagcgaaagcgtggataactatggctttagctttatgaactggtttcagcagaaaccgggccagccgccgaaactgctgatttatgcgaccagcaaccgcggcagcggcgtgccggcgcgctttagcggcagcggcagcggcaccgattttagcctgaacattcatccggtggaagaagatgatagcgcgatgtatttttgccagcagaccaaagaagtgccgtggacctttggcggcggcaccaaactggaaattaaacgctaa

SEQ ID NO: 1203 - DNA, 939 bp, synthetic construct
  source 1..939: mol_type = other DNA; note = NLS-DCAF1-(GS)4-3DX.1 nucleic acid
ccggcggcgaaacgcgtgaaactggatggcagcggcagcggcagccaggcgccgattaactttaccagccgcctgaaccgccgcgcgagctttccgaaatatggcggcgtggatggcggctgctttgatcgccatctgatttttagccgcggcagcggcagcggcagcggcagcgaagtgaaactggtggaaagcggcggcgatctggtgaaaccgggcggcagcctgaaactgagctgcgcggcgagcggctttacctttagccattatggcatgagctgggtgcgccagaccccggataaacgcctggaatgggtggcgaccattggcagccgcggcacctatacccattatccggatagcgtgaaaggccgctttaccattagccgcgataacgataaaaacgcgctgtatctgcagatgaacagcctgcgcaccgaagataccgcgatgtattattgcgcgcgcaaaagcgaattttattattatggcaacacctattattatagcgcgatggattattggggccagggcgcgagcgtgaccgtgagcagcggcggcggcggcagcggcggcggcgatagcggcggcggcggcagcgatattgtgctgacccagagcccggcgagcctggcggtgagcctgggccagcgcgcgaccattagctgccgcgcgagcgaaagcgtggataactatggctttagctttatgaactggtttcagcagaaaccgggccagccgccgaaactgctgatttatgcgaccagcaaccgcggcagcggcgtgccggcgcgctttagcggcagcggcagcggcaccgattttagcctgaacattcatccggtggaagaagatgatagcgcgatgtatttttgccagcagaccaaagaagtgccgtggacctttggcggcggcaccaaactggaaattaaacgctaa

SEQ ID NO: 1204 - DNA, 945 bp, synthetic construct
  source 1..945: mol_type = other DNA; note = NLS-DCAF1-(GS)5-3DX.1 nucleic acid
ccggcggcgaaacgcgtgaaactggatggcagcggcagcggcagccaggcgccgattaactttaccagccgcctgaaccgccgcgcgagctttccgaaatatggcggcgtggatggcggctgctttgatcgccatctgatttttagccgcggcagcggcagcggcagcggcagcggcagcgaagtgaaactggtggaaagcggcggcgatctggtgaaaccgggcggcagcctgaaactgagctgcgcggcgagcggctttacctttagccattatggcatgagctgggtgcgccagaccccggataaacgcctggaatgggtggcgaccattggcagccgcggcacctatacccattatccggatagcgtgaaaggccgctttaccattagccgcgataacgataaaaacgcgctgtatctgcagatgaacagcctgcgcaccgaagataccgcgatgtattattgcgcgcgcaaaagcgaattttattattatggcaacacctattattatagcgcgatggattattggggccagggcgcgagcgtgaccgtgagcagcggcggcggcggcagcggcggcggcgatagcggcggcggcggcagcgatattgtgctgacccagagcccggcgagcctggcggtgagcctgggccagcgcgcgaccattagctgccgcgcgagcgaaagcgtggataactatggctttagctttatgaactggtttcagcagaaaccgggccagccgccgaaactgctgatttatgcgaccagcaaccgcggcagcggcgtgccggcgcgctttagcggcagcggcagcggcaccgattttagcctgaacattcatccggtggaagaagatgatagcgcgatgtatttttgccagcagaccaaagaagtgccgtggacctttggcggcggcaccaaactggaaattaaacgctaa

SEQ ID NO: 1205 - DNA, 951 bp, synthetic construct
  source 1..951: mol_type = other DNA; note = NLS-DCAF1-(GS)6-3DX.1 nucleic acid
ccggcggcgaaacgcgtgaaactggatggcagcggcagcggcagccaggcgccgattaactttaccagccgcctgaaccgccgcgcgagctttccgaaatatggcggcgtggatggcggctgctttgatcgccatctgatttttagccgcggcagcggcagcggcagcggcagcggcagcggcagcgaagtgaaactggtggaaagcggcggcgatctggtgaaaccgggcggcagcctgaaactgagctgcgcggcgagcggctttacctttagccattatggcatgagctgggtgcgccagaccccggataaacgcctggaatgggtggcgaccattggcagccgcggcacctatacccattatccggatagcgtgaaaggccgctttaccattagccgcgataacgataaaaacgcgctgtatctgcagatgaacagcctgcgcaccgaagataccgcgatgtattattgcgcgcgcaaaagcgaattttattattatggcaacacctattattatagcgcgatggattattggggccagggcgcgagcgtgaccgtgagcagcggcggcggcggcagcggcggcggcgatagcggcggcggcggcagcgatattgtgctgacccagagcccggcgagcctggcggtgagcctgggccagcgcgcgaccattagctgccgcgcgagcgaaagcgtggataactatggctttagctttatgaactggtttcagcagaaaccgggccagccgccgaaactgctgatttatgcgaccagcaaccgcggcagcggcgtgccggcgcgctttagcggcagcggcagcggcaccgattttagcctgaacattcatccggtggaagaagatgatagcgcgatgtatttttgccagcagaccaaagaagtgccgtggacctttggcggcggcaccaaactggaaattaaacgctaa

SEQ ID NO: 1206 - DNA, 951 bp, synthetic construct
  source 1..951: mol_type = other DNA; note = HA-NLS-DCAF1-(GS)1-3DX.1 nucleic acid
atgtacccatacgatgttccagattacgctccggcggcgaaacgcgtgaaactggatggcagcggcagcggcagccaggcgccgattaactttaccagccgcctgaaccgccgcgcgagctttccgaaatatggcggcgtggatggcggctgctttgatcgccatctgatttttagccgcggcagcgaagtgaaactggtggaaagcggcggcgatctggtgaaaccgggcggcagcctgaaactgagctgcgcggcgagcggctttacctttagccattatggcatgagctgggtgcgccagaccccggataaacgcctggaatgggtggcgaccattggcagccgcggcacctatacccattatccggatagcgtgaaaggccgctttaccattagccgcgataacgataaaaacgcgctgtatctgcagatgaacagcctgcgcaccgaagataccgcgatgtattattgcgcgcgcaaaagcgaattttattattatggcaacacctattattatagcgcgatggattattggggccagggcgcgagcgtgaccgtgagcagcggcggcggcggcagcggcggcggcgatagcggcggcggcggcagcgatattgtgctgacccagagcccggcgagcctggcggtgagcctgggccagcgcgcgaccattagctgccgcgcgagcgaaagcgtggataactatggctttagctttatgaactggtttcagcagaaaccgggccagccgccgaaactgctgatttatgcgaccagcaaccgcggcagcggcgtgccggcgcgctttagcggcagcggcagcggcaccgattttagcctgaacattcatccggtggaagaagatgatagcgcgatgtatttttgccagcagaccaaagaagtgccgtggacctttggcggcggcaccaaactggaaattaaacgctaa

SEQ ID NO: 1207 - DNA, 957 bp, synthetic construct
  source 1..957: mol_type = other DNA; note = HA-NLS-DCAF1-(GS)2-3DX.1 nucleic acid
atgtacccatacgatgttccagattacgctccggcggcgaaacgcgtgaaactggatggcagcggcagcggcagccaggcgccgattaactttaccagccgcctgaaccgccgcgcgagctttccgaaatatggcggcgtggatggcggctgctttgatcgccatctgatttttagccgcggcagcggcagcgaagtgaaactggtggaaagcggcggcgatctggtgaaaccgggcggcagcctgaaactgagctgcgcggcgagcggctttacctttagccattatggcatgagctgggtgcgccagaccccggataaacgcctggaatgggtggcgaccattggcagccgcggcacctatacccattatccggatagcgtgaaaggccgctttaccattagccgcgataacgataaaaacgcgctgtatctgcagatgaacagcctgcgcaccgaagataccgcgatgtattattgcgcgcgcaaaagcgaattttattattatggcaacacctattattatagcgcgatggattattggggccagggcgcgagcgtgaccgtgagcagcggcggcggcggcagcggcggcggcgatagcggcggcggcggcagcgatattgtgctgacccagagcccggcgagcctggcggtgagcctgggccagcgcgcgaccattagctgccgcgcgagcgaaagcgtggataactatggctttagctttatgaactggtttcagcagaaaccgggccagccgccgaaactgctgatttatgcgaccagcaaccgcggcagcggcgtgccggcgcgctttagcggcagcggcagcggcaccgattttagcctgaacattcatccggtggaagaagatgatagcgcgatgtatttttgccagcagaccaaagaagtgccgtggacctttggcggcggcaccaaactggaaattaaacgctaa

SEQ ID NO: 1208 - DNA, 963 bp, synthetic construct
  source 1..963: mol_type = other DNA; note = HA-NLS-DCAF1-(GS)3-3DX.1 nucleic acid
atgtacccatacgatgttccagattacgctccggcggcgaaacgcgtgaaactggatggcagcggcagcggcagccaggcgccgattaactttaccagccgcctgaaccgccgcgcgagctttccgaaatatggcggcgtggatggcggctgctttgatcgccatctgatttttagccgcggcagcggcagcggcagcgaagtgaaactggtggaaagcggcggcgatctggtgaaaccgggcggcagcctgaaactgagctgcgcggcgagcggctttacctttagccattatggcatgagctgggtgcgccagaccccggataaacgcctggaatgggtggcgaccattggcagccgcggcacctatacccattatccggatagcgtgaaaggccgctttaccattagccgcgataacgataaaaacgcgctgtatctgcagatgaacagcctgcgcaccgaagataccgcgatgtattattgcgcgcgcaaaagcgaattttattattatggcaacacctattattatagcgcgatggattattggggccagggcgcgagcgtgaccgtgagcagcggcggcggcggcagcggcggcggcgatagcggcggcggcggcagcgatattgtgctgacccagagcccggcgagcctggcggtgagcctgggccagcgcgcgaccattagctgccgcgcgagcgaaagcgtggataactatggctttagctttatgaactggtttcagcagaaaccgggccagccgccgaaactgctgatttatgcgaccagcaaccgcggcagcggcgtgccggcgcgctttagcggcagcggcagcggcaccgattttagcctgaacattcatccggtggaagaagatgatagcgcgatgtatttttgccagcagaccaaagaagtgccgtggacctttggcggcggcaccaaactggaaattaaacgctaa

SEQ ID NO: 1209 - DNA, 969 bp, synthetic construct
  source 1..969: mol_type = other DNA; note = HA-NLS-DCAF1-(GS)4-3DX.1 nucleic acid
atgtacccatacgatgttccagattacgctccggcggcgaaacgcgtgaaactggatggcagcggcagcggcagccaggcgccgattaactttaccagccgcctgaaccgccgcgcgagctttccgaaatatggcggcgtggatggcggctgctttgatcgccatctgatttttagccgcggcagcggcagcggcagcggcagcgaagtgaaactggtggaaagcggcggcgatctggtgaaaccgggcggcagcctgaaactgagctgcgcggcgagcggctttacctttagccattatggcatgagctgggtgcgccagaccccggataaacgcctggaatgggtggcgaccattggcagccgcggcacctatacccattatccggatagcgtgaaaggccgctttaccattagccgcgataacgataaaaacgcgctgtatctgcagatgaacagcctgcgcaccgaagataccgcgatgtattattgcgcgcgcaaaagcgaattttattattatggcaacacctattattatagcgcgatggattattggggccagggcgcgagcgtgaccgtgagcagcggcggcggcggcagcggcggcggcgatagcggcggcggcggcagcgatattgtgctgacccagagcccggcgagcctggcggtgagcctgggccagcgcgcgaccattagctgccgcgcgagcgaaagcgtggataactatggctttagctttatgaactggtttcagcagaaaccgggccagccgccgaaactgctgatttatgcgaccagcaaccgcggcagcggcgtgccggcgcgctttagcggcagcggcagcggcaccgattttagcctgaacattcatccggtggaagaagatgatagcgcgatgtatttttgccagcagaccaaagaagtgccgtggacctttggcggcggcaccaaactggaaattaaacgctaa

SEQ ID NO: 1210 - DNA, 975 bp, synthetic construct
  source 1..975: mol_type = other DNA; note = HA-NLS-DCAF1-(GS)5-3DX.1 nucleic acid
atgtacccatacgatgttccagattacgctccggcggcgaaacgcgtgaaactggatggcagcggcagcggcagccaggcgccgattaactttaccagccgcctgaaccgccgcgcgagctttccgaaatatggcggcgtggatggcggctgctttgatcgccatctgatttttagccgcggcagcggcagcggcagcggcagcggcagcgaagtgaaactggtggaaagcggcggcgatctggtgaaaccgggcggcagcctgaaactgagctgcgcggcgagcggctttacctttagccattatggcatgagctgggtgcgccagaccccggataaacgcctggaatgggtggcgaccattggcagccgcggcacctatacccattatccggatagcgtgaaaggccgctttaccattagccgcgataacgataaaaacgcgctgtatctgcagatgaacagcctgcgcaccgaagataccgcgatgtattattgcgcgcgcaaaagcgaattttattattatggcaacacctattattatagcgcgatggattattggggccagggcgcgagcgtgaccgtgagcagcggcggcggcggcagcggcggcggcgatagcggcggcggcggcagcgatattgtgctgacccagagcccggcgagcctggcggtgagcctgggccagcgcgcgaccattagctgccgcgcgagcgaaagcgtggataactatggctttagctttatgaactggtttcagcagaaaccgggccagccgccgaaactgctgatttatgcgaccagcaaccgcggcagcggcgtgccggcgcgctttagcggcagcggcagcggcaccgattttagcctgaacattcatccggtggaagaagatgatagcgcgatgtatttttgccagcagaccaaagaagtgccgtggacctttggcggcggcaccaaactggaaattaaacgctaa

SEQ ID NO: 1211 - DNA, 981 bp, synthetic construct
  source 1..981: mol_type = other DNA; note = HA-NLS-DCAF1-(GS)6-3DX.1 nucleic acid
atgtacccatacgatgttccagattacgctccggcggcgaaacgcgtgaaactggatggcagcggcagcggcagccaggcgccgattaactttaccagccgcctgaaccgccgcgcgagctttccgaaatatggcggcgtggatggcggctgctttgatcgccatctgatttttagccgcggcagcggcagcggcagcggcagcggcagcggcagcgaagtgaaactggtggaaagcggcggcgatctggtgaaaccgggcggcagcctgaaactgagctgcgcggcgagcggctttacctttagccattatggcatgagctgggtgcgccagaccccggataaacgcctggaatgggtggcgaccattggcagccgcggcacctatacccattatccggatagcgtgaaaggccgctttaccattagccgcgataacgataaaaacgcgctgtatctgcagatgaacagcctgcgcaccgaagataccgcgatgtattattgcgcgcgcaaaagcgaattttattattatggcaacacctattattatagcgcgatggattattggggccagggcgcgagcgtgaccgtgagcagcggcggcggcggcagcggcggcggcgatagcggcggcggcggcagcgatattgtgctgacccagagcccggcgagcctggcggtgagcctgggccagcgcgcgaccattagctgccgcgcgagcgaaagcgtggataactatggctttagctttatgaactggtttcagcagaaaccgggccagccgccgaaactgctgatttatgcgaccagcaaccgcggcagcggcgtgccggcgcgctttagcggcagcggcagcggcaccgattttagcctgaacattcatccggtggaagaagatgatagcgcgatgtatttttgccagcagaccaaagaagtgccgtggacctttggcggcggcaccaaactggaaattaaacgctaa

SEQ ID NO: 1212 - DNA, 1884 bp, synthetic construct
  source 1..1884: mol_type = other DNA; note = NLS-3DX.1-(GS)1-E6AP nucleic acid
ccggcggcgaaacgcgtgaaactggatggcagcggcagcggcagcgaagtgaaactggtggaaagcggcggcgatctggtgaaaccgggcggcagcctgaaactgagctgcgcggcgagcggctttacctttagccattatggcatgagctgggtgcgccagaccccggataaacgcctggaatgggtggcgaccattggcagccgcggcacctatacccattatccggatagcgtgaaaggccgctttaccattagccgcgataacgataaaaacgcgctgtatctgcagatgaacagcctgcgcaccgaagataccgcgatgtattattgcgcgcgcaaaagcgaattttattattatggcaacacctattattatagcgcgatggattattggggccagggcgcgagcgtgaccgtgagcagcggcggcggcggcagcggcggcggcgatagcggcggcggcggcagcgatattgtgctgacccagagcccggcgagcctggcggtgagcctgggccagcgcgcgaccattagctgccgcgcgagcgaaagcgtggataactatggctttagctttatgaactggtttcagcagaaaccgggccagccgccgaaactgctgatttatgcgaccagcaaccgcggcagcggcgtgccggcgcgctttagcggcagcggcagcggcaccgattttagcctgaacattcatccggtggaagaagatgatagcgcgatgtatttttgccagcagaccaaagaagtgccgtggacctttggcggcggcaccaaactggaaattaaacgcggcagcaatccatatttgagactcaaagttagacgtgaccatatcatagatgatgcacttgtccggctagagatgatcgctatggaaaatcctgcagacttgaagaagcagttgtatgtggaatttgaaggagaacaaggagttgatgagggaggtgtttccaaagaattttttcagctggttgtggaggaaatcttcaatccagatattggtatgttcacatacgatgaatctacaaaattgttttggtttaatccatcttcttttgaaactgagggtcagtttactctgattggcatagtactgggtctggctatttacaataactgtatactggatgtacattttcccatggttgtctacaggaagctaatggggaaaaaaggaacttttcgtgacttgggagactctcacccagttctatatcagagtttaaaagatttattggagtatgaagggaatgtggaagatgacatgatgatcactttccagatatcacagacagatctttttggtaacccaatgatgtatgatctaaaggaaaatggtgataaaattccaattacaaatgaaaacaggaaggaatttgtcaatctttattctgactacattctcaataaatcagtagaaaaacagttcaaggcttttcggagaggttttcatatggtgaccaatgaatctcccttaaagtacttattcagaccagaagaaattgaattgcttatatgtggaagccggaatctagatttccaagcactagaagaaactacagaatatgacggtggctataccagggactctgttctgattagggagttctgggaaatcgttcattcatttacagatgaacagaaaagactcttcttgcagtttacaacgggcacagacagagcacctgtgggaggactaggaaaattaaagatgattatagccaaaaatggcccagacacagaaaggttacctacatctcatacttgctttaatgtgcttttacttccggaatactcaagcaaagaaaaacttaaagagagattgttgaaggccatcacgtatgccaaaggatttggcatgctgtaa

SEQ ID NO: 1213 - DNA, 1890 bp, synthetic construct
  source 1..1890: mol_type = other DNA; note = NLS-3DX.1-(GS)2-E6AP nucleic acid
ccggcggcgaaacgcgtgaaactggatggcagcggcagcggcagcgaagtgaaactggtggaaagcggcggcgatctggtgaaaccgggcggcagcctgaaactgagctgcgcggcgagcggctttacctttagccattatggcatgagctgggtgcgccagaccccggataaacgcctggaatgggtggcgaccattggcagccgcggcacctatacccattatccggatagcgtgaaaggccgctttaccattagccgcgataacgataaaaacgcgctgtatctgcagatgaacagcctgcgcaccgaagataccgcgatgtattattgcgcgcgcaaaagcgaattttattattatggcaacacctattattatagcgcgatggattattggggccagggcgcgagcgtgaccgtgagcagcggcggcggcggcagcggcggcggcgatagcggcggcggcggcagcgatattgtgctgacccagagcccggcgagcctggcggtgagcctgggccagcgcgcgaccattagctgccgcgcgagcgaaagcgtggataactatggctttagctttatgaactggtttcagcagaaaccgggccagccgccgaaactgctgatttatgcgaccagcaaccgcggcagcggcgtgccggcgcgctttagcggcagcggcagcggcaccgattttagcctgaacattcatccggtggaagaagatgatagcgcgatgtatttttgccagcagaccaaagaagtgccgtggacctttggcggcggcaccaaactggaaattaaacgcggcagcggcagcaatccatatttgagactcaaagttagacgtgaccatatcatagatgatgcacttgtccggctagagatgatcgctatggaaaatcctgcagacttgaagaagcagttgtatgtggaatttgaaggagaacaaggagttgatgagggaggtgtttccaaagaattttttcagctggttgtggaggaaatcttcaatccagatattggtatgttcacatacgatgaatctacaaaattgttttggtttaatccatcttcttttgaaactgagggtcagtttactctgattggcatagtactgggtctggctatttacaataactgtatactggatgtacattttcccatggttgtctacaggaagctaatggggaaaaaaggaacttttcgtgacttgggagactctcacccagttctatatcagagtttaaaagatttattggagtatgaagggaatgtggaagatgacatgatgatcactttccagatatcacagacagatctttttggtaacccaatgatgtatgatctaaaggaaaatggtgataaaattccaattacaaatgaaaacaggaaggaatttgtcaatctttattctgactacattctcaataaatcagtagaaaaacagttcaaggcttttcggagaggttttcatatggtgaccaatgaatctcccttaaagtacttattcagaccagaagaaattgaattgcttatatgtggaagccggaatctagatttccaagcactagaagaaactacagaatatgacggtggctataccagggactctgttctgattagggagttctgggaaatcgttcattcatttacagatgaacagaaaagactcttcttgcagtttacaacgggcacagacagagcacctgtgggaggactaggaaaattaaagatgattatagccaaaaatggcccagacacagaaaggttacctacatctcatacttgctttaatgtgcttttacttccggaatactcaagcaaagaaaaacttaaagagagattgttgaaggccatcacgtatgccaaaggatttggcatgctgtaa

SEQ ID NO: 1214 - DNA, 1896 bp, synthetic construct
  source 1..1896: mol_type = other DNA; note = NLS-3DX.1-(GS)3-E6AP nucleic acid
ccggcggcgaaacgcgtgaaactggatggcagcggcagcggcagcgaagtgaaactggtggaaagcggcggcgatctggtgaaaccgggcggcagcctgaaactgagctgcgcggcgagcggctttacctttagccattatggcatgagctgggtgcgccagaccccggataaacgcctggaatgggtggcgaccattggcagccgcggcacctatacccattatccggatagcgtgaaaggccgctttaccattagccgcgataacgataaaaacgcgctgtatctgcagatgaacagcctgcgcaccgaagataccgcgatgtattattgcgcgcgcaaaagcgaattttattattatggcaacacctattattatagcgcgatggattattggggccagggcgcgagcgtgaccgtgagcagcggcggcggcggcagcggcggcggcgatagcggcggcggcggcagcgatattgtgctgacccagagcccggcgagcctggcggtgagcctgggccagcgcgcgaccattagctgccgcgcgagcgaaagcgtggataactatggctttagctttatgaactggtttcagcagaaaccgggccagccgccgaaactgctgatttatgcgaccagcaaccgcggcagcggcgtgccggcgcgctttagcggcagcggcagcggcaccgattttagcctgaacattcatccggtggaagaagatgatagcgcgatgtatttttgccagcagaccaaagaagtgccgtggacctttggcggcggcaccaaactggaaattaaacgcggcagcggcagcggcagcaatccatatttgagactcaaagttagacgtgaccatatcatagatgatgcacttgtccggctagagatgatcgctatggaaaatcctgcagacttgaagaagcagttgtatgtggaatttgaaggagaacaaggagttgatgagggaggtgtttccaaagaattttttcagctggttgtggaggaaatcttcaatccagatattggtatgttcacatacgatgaatctacaaaattgttttggtttaatccatcttcttttgaaactgagggtcagtttactctgattggcatagtactgggtctggctatttacaataactgtatactggatgtacattttcccatggttgtctacaggaagctaatggggaaaaaaggaacttttcgtgacttgggagactctcacccagttctatatcagagtttaaaagatttattggagtatgaagggaatgtggaagatgacatgatgatcactttccagatatcacagacagatctttttggtaacccaatgatgtatgatctaaaggaaaatggtgataaaattccaattacaaatgaaaacaggaaggaatttgtcaatctttattctgactacattctcaataaatcagtagaaaaacagttcaaggcttttcggagaggttttcatatggtgaccaatgaatctcccttaaagtacttattcagaccagaagaaattgaattgcttatatgtggaagccggaatctagatttccaagcactagaagaaactacagaatatgacggtggctataccagggactctgttctgattagggagttctgggaaatcgttcattcatttacagatgaacagaaaagactcttcttgcagtttacaacgggcacagacagagcacctgtgggaggactaggaaaattaaagatgattatagccaaaaatggcccagacacagaaaggttacctacatctcatacttgctttaatgtgcttttacttccggaatactcaagcaaagaaaaacttaaagagagattgttgaaggccatcacgtatgccaaaggatttggcatgctgtaa

SEQ ID NO: 1215 - DNA, 1902 bp, synthetic construct
  source 1..1902: mol_type = other DNA; note = NLS-3DX.1-(GS)4-E6AP nucleic acid
ccggcggcgaaacgcgtgaaactggatggcagcggcagcggcagcgaagtgaaactggtggaaagcggcggcgatctggtgaaaccgggcggcagcctgaaactgagctgcgcggcgagcggctttacctttagccattatggcatgagctgggtgcgccagaccccggataaacgcctggaatgggtggcgaccattggcagccgcggcacctatacccattatccggatagcgtgaaaggccgctttaccattagccgcgataacgataaaaacgcgctgtatctgcagatgaacagcctgcgcaccgaagataccgcgatgtattattgcgcgcgcaaaagcgaattttattattatggcaacacctattattatagcgcgatggattattggggccagggcgcgagcgtgaccgtgagcagcggcggcggcggcagcggcggcggcgatagcggcggcggcggcagcgatattgtgctgacccagagcccggcgagcctggcggtgagcctgggccagcgcgcgaccattagctgccgcgcgagcgaaagcgtggataactatggctttagctttatgaactggtttcagcagaaaccgggccagccgccgaaactgctgatttatgcgaccagcaaccgcggcagcggcgtgccggcgcgctttagcggcagcggcagcggcaccgattttagcctgaacattcatccggtggaagaagatgatagcgcgatgtatttttgccagcagaccaaagaagtgccgtggacctttggcggcggcaccaaactggaaattaaacgcggcagcggcagcggcagcggcagcaatccatatttgagactcaaagttagacgtgaccatatcatagatgatgcacttgtccggctagagatgatcgctatggaaaatcctgcagacttgaagaagcagttgtatgtggaatttgaaggagaacaaggagttgatgagggaggtgtttccaaagaattttttcagctggttgtggaggaaatcttcaatccagatattggtatgttcacatacgatgaatctacaaaattgttttggtttaatccatcttcttttgaaactgagggtcagtttactctgattggcatagtactgggtctggctatttacaataactgtatactggatgtacattttcccatggttgtctacaggaagctaatggggaaaaaaggaacttttcgtgacttgggagactctcacccagttctatatcagagtttaaaagatttattggagtatgaagggaatgtggaagatgacatgatgatcactttccagatatcacagacagatctttttggtaacccaatgatgtatgatctaaaggaaaatggtgataaaattccaattacaaatgaaaacaggaaggaatttgtcaatctttattctgactacattctcaataaatcagtagaaaaacagttcaaggcttttcggagaggttttcatatggtgaccaatgaatctcccttaaagtacttattcagaccagaagaaattgaattgcttatatgtggaagccggaatctagatttccaagcactagaagaaactacagaatatgacggtggctataccagggactctgttctgattagggagttctgggaaatcgttcattcatttacagatgaacagaaaagactcttcttgcagtttacaacgggcacagacagagcacctgtgggaggactaggaaaattaaagatgattatagccaaaaatggcccagacacagaaaggttacctacatctcatacttgctttaatgtgcttttacttccggaatactcaagcaaagaaaaacttaaagagagattgttgaaggccatcacgtatgccaaaggatttggcatgctgtaa

SEQ ID NO: 1216 - DNA, 1908 bp, synthetic construct
  source 1..1908: mol_type = other DNA; note = NLS-3DX.1-(GS)5-E6AP nucleic acid
ccggcggcgaaacgcgtgaaactggatggcagcggcagcggcagcgaagtgaaactggtggaaagcggcggcgatctggtgaaaccgggcggcagcctgaaactgagctgcgcggcgagcggctttacctttagccattatggcatgagctgggtgcgccagaccccggataaacgcctggaatgggtggcgaccattggcagccgcggcacctatacccattatccggatagcgtgaaaggccgctttaccattagccgcgataacgataaaaacgcgctgtatctgcagatgaacagcctgcgcaccgaagataccgcgatgtattattgcgcgcgcaaaagcgaattttattattatggcaacacctattattatagcgcgatggattattggggccagggcgcgagcgtgaccgtgagcagcggcggcggcggcagcggcggcggcgatagcggcggcggcggcagcgatattgtgctgacccagagcccggcgagcctggcggtgagcctgggccagcgcgcgaccattagctgccgcgcgagcgaaagcgtggataactatggctttagctttatgaactggtttcagcagaaaccgggccagccgccgaaactgctgatttatgcgaccagcaaccgcggcagcggcgtgccggcgcgctttagcggcagcggcagcggcaccgattttagcctgaacattcatccggtggaagaagatgatagcgcgatgtatttttgccagcagaccaaagaagtgccgtggacctttggcggcggcaccaaactggaaattaaacgcggcagcggcagcggcagcggcagcggcagcaatccatatttgagactcaaagttagacgtgaccatatcatagatgatgcacttgtccggctagagatgatcgctatggaaaatcctgcagacttgaagaagcagttgtatgtggaatttgaaggagaacaaggagttgatgagggaggtgtttccaaagaattttttcagctggttgtggaggaaatcttcaatccagatattggtatgttcacatacgatgaatctacaaaattgttttggtttaatccatcttcttttgaaactgagggtcagtttactctgattggcatagtactgggtctggctatttacaataactgtatactggatgtacattttcccatggttgtctacaggaagctaatggggaaaaaaggaacttttcgtgacttgggagactctcacccagttctatatcagagtttaaaagatttattggagtatgaagggaatgtggaagatgacatgatgatcactttccagatatcacagacagatctttttggtaacccaatgatgtatgatctaaaggaaaatggtgataaaattccaattacaaatgaaaacaggaaggaatttgtcaatctttattctgactacattctcaataaatcagtagaaaaacagttcaaggcttttcggagaggttttcatatggtgaccaatgaatctcccttaaagtacttattcagaccagaagaaattgaattgcttatatgtggaagccggaatctagatttccaagcactagaagaaactacagaatatgacggtggctataccagggactctgttctgattagggagttctgggaaatcgttcattcatttacagatgaacagaaaagactcttcttgcagtttacaacgggcacagacagagcacctgtgggaggactaggaaaattaaagatgattatagccaaaaatggcccagacacagaaaggttacctacatctcatacttgctttaatgtgcttttacttccggaatactcaagcaaagaaaaacttaaagagagattgttgaaggccatcacgtatgccaaaggatttggcatgctgtaa

SEQ ID NO: 1217 - DNA, 1914 bp, synthetic construct
  source 1..1914: mol_type = other DNA; note = NLS-3DX.1-(GS)6-E6AP nucleic acid
ccggcggcgaaacgcgtgaaactggatggcagcggcagcggcagcgaagtgaaactggtggaaagcggcggcgatctggtgaaaccgggcggcagcctgaaactgagctgcgcggcgagcggctttacctttagccattatggcatgagctgggtgcgccagaccccggataaacgcctggaatgggtggcgaccattggcagccgcggcacctatacccattatccggatagcgtgaaaggccgctttaccattagccgcgataacgataaaaacgcgctgtatctgcagatgaacagcctgcgcaccgaagataccgcgatgtattattgcgcgcgcaaaagcgaattttattattatggcaacacctattattatagcgcgatggattattggggccagggcgcgagcgtgaccgtgagcagcggcggcggcggcagcggcggcggcgatagcggcggcggcggcagcgatattgtgctgacccagagcccggcgagcctggcggtgagcctgggccagcgcgcgaccattagctgccgcgcgagcgaaagcgtggataactatggctttagctttatgaactggtttcagcagaaaccgggccagccgccgaaactgctgatttatgcgaccagcaaccgcggcagcggcgtgccggcgcgctttagcggcagcggcagcggcaccgattttagcctgaacattcatccggtggaagaagatgatagcgcgatgtatttttgccagcagaccaaagaagtgccgtggacctttggcggcggcaccaaactggaaattaaacgcggcagcggcagcggcagcggcagcggcagcggcagcaatccatatttgagactcaaagttagacgtgaccatatcatagatgatgcacttgtccggctagagatgatcgctatggaaaatcctgcagacttgaagaagcagttgtatgtggaatttgaaggagaacaaggagttgatgagggaggtgtttccaaagaattttttcagctggttgtggaggaaatcttcaatccagatattggtatgttcacatacgatgaatctacaaaattgttttggtttaatccatcttcttttgaaactgagggtcagtttactctgattggcatagtactgggtctggctatttacaataactgtatactggatgtacattttcccatggttgtctacaggaagctaatggggaaaaaaggaacttttcgtgacttgggagactctcacccagttctatatcagagtttaaaagatttattggagtatgaagggaatgtggaagatgacatgatgatcactttccagatatcacagacagatctttttggtaacccaatgatgtatgatctaaaggaaaatggtgataaaattccaattacaaatgaaaacaggaaggaatttgtcaatctttattctgactacattctcaataaatcagtagaaaaacagttcaaggcttttcggagaggttttcatatggtgaccaatgaatctcccttaaagtacttattcagaccagaagaaattgaattgcttatatgtggaagccggaatctagatttccaagcactagaagaaactacagaatatgacggtggctataccagggactctgttctgattagggagttctgggaaatcgttcattcatttacagatgaacagaaaagactcttcttgcagtttacaacgggcacagacagagcacctgtgggaggactaggaaaattaaagatgattatagccaaaaatggcccagacacagaaaggttacctacatctcatacttgctttaatgtgcttttacttccggaatactcaagcaaagaaaaacttaaagagagattgttgaaggccatcacgtatgccaaaggatttggcatgctgtaa

SEQ ID NO: 1218 - DNA, 1914 bp, synthetic construct
  source 1..1914: mol_type = other DNA; note = HA-NLS-3DX.1-(GS)1-E6AP nucleic acid
atgtacccatacgatgttccagattacgctccggcggcgaaacgcgtgaaactggatggcagcggcagcggcagcgaagtgaaactggtggaaagcggcggcgatctggtgaaaccgggcggcagcctgaaactgagctgcgcggcgagcggctttacctttagccattatggcatgagctgggtgcgccagaccccggataaacgcctggaatgggtggcgaccattggcagccgcggcacctatacccattatccggatagcgtgaaaggccgctttaccattagccgcgataacgataaaaacgcgctgtatctgcagatgaacagcctgcgcaccgaagataccgcgatgtattattgcgcgcgcaaaagcgaattttattattatggcaacacctattattatagcgcgatggattattggggccagggcgcgagcgtgaccgtgagcagcggcggcggcggcagcggcggcggcgatagcggcggcggcggcagcgatattgtgctgacccagagcccggcgagcctggcggtgagcctgggccagcgcgcgaccattagctgccgcgcgagcgaaagcgtggataactatggctttagctttatgaactggtttcagcagaaaccgggccagccgccgaaactgctgatttatgcgaccagcaaccgcggcagcggcgtgccggcgcgctttagcggcagcggcagcggcaccgattttagcctgaacattcatccggtggaagaagatgatagcgcgatgtatttttgccagcagaccaaagaagtgccgtggacctttggcggcggcaccaaactggaaattaaacgcggcagcaatccatatttgagactcaaagttagacgtgaccatatcatagatgatgcacttgtccggctagagatgatcgctatggaaaatcctgcagacttgaagaagcagttgtatgtggaatttgaaggagaacaaggagttgatgagggaggtgtttccaaagaattttttcagctggttgtggaggaaatcttcaatccagatattggtatgttcacatacgatgaatctacaaaattgttttggtttaatccatcttcttttgaaactgagggtcagtttactctgattggcatagtactgggtctggctatttacaataactgtatactggatgtacattttcccatggttgtctacaggaagctaatggggaaaaaaggaacttttcgtgacttgggagactctcacccagttctatatcagagtttaaaagatttattggagtatgaagggaatgtggaagatgacatgatgatcactttccagatatcacagacagatctttttggtaacccaatgatgtatgatctaaaggaaaatggtgataaaattccaattacaaatgaaaacaggaaggaatttgtcaatctttattctgactacattctcaataaatcagtagaaaaacagttcaaggcttttcggagaggttttcatatggtgaccaatgaatctcccttaaagtacttattcagaccagaagaaattgaattgcttatatgtggaagccggaatctagatttccaagcactagaagaaactacagaatatgacggtggctataccagggactctgttctgattagggagttctgggaaatcgttcattcatttacagatgaacagaaaagactcttcttgcagtttacaacgggcacagacagagcacctgtgggaggactaggaaaattaaagatgattatagccaaaaatggcccagacacagaaaggttacctacatctcatacttgctttaatgtgcttttacttccggaatactcaagcaaagaaaaacttaaagagagattgttgaaggccatcacgtatgccaaaggatttggcatgctgtaa

SEQ ID NO: 1219 - DNA, 1920 bp, synthetic construct
  source 1..1920: mol_type = other DNA; note = HA-NLS-3DX.1-(GS)2-E6AP nucleic acid
atgtacccatacgatgttccagattacgctccggcggcgaaacgcgtgaaactggatggcagcggcagcggcagcgaagtgaaactggtggaaagcggcggcgatctggtgaaaccgggcggcagcctgaaactgagctgcgcggcgagcggctttacctttagccattatggcatgagctgggtgcgccagaccccggataaacgcctggaatgggtggcgaccattggcagccgcggcacctatacccattatccggatagcgtgaaaggccgctttaccattagccgcgataacgataaaaacgcgctgtatctgcagatgaacagcctgcgcaccgaagataccgcgatgtattattgcgcgcgcaaaagcgaattttattattatggcaacacctattattatagcgcgatggattattggggccagggcgcgagcgtgaccgtgagcagcggcggcggcggcagcggcggcggcgatagcggcggcggcggcagcgatattgtgctgacccagagcccggcgagcctggcggtgagcctgggccagcgcgcgaccattagctgccgcgcgagcgaaagcgtggataactatggctttagctttatgaactggtttcagcagaaaccgggccagccgccgaaactgctgatttatgcgaccagcaaccgcggcagcggcgtgccggcgcgctttagcggcagcggcagcggcaccgattttagcctgaacattcatccggtggaagaagatgatagcgcgatgtatttttgccagcagaccaaagaagtgccgtggacctttggcggcggcaccaaactggaaattaaacgcggcagcggcagcaatccatatttgagactcaaagttagacgtgaccatatcatagatgatgcacttgtccggctagagatgatcgctatggaaaatcctgcagacttgaagaagcagttgtatgtggaatttgaaggagaacaaggagttgatgagggaggtgtttccaaagaattttttcagctggttgtggaggaaatcttcaatccagatattggtatgttcacatacgatgaatctacaaaattgttttggtttaatccatcttcttttgaaactgagggtcagtttactctgattggcatagtactgggtctggctatttacaataactgtatactggatgtacattttcccatggttgtctacaggaagctaatggggaaaaaaggaacttttcgtgacttgggagactctcacccagttctatatcagagtttaaaagatttattggagtatgaagggaatgtggaagatgacatgatgatcactttccagatatcacagacagatctttttggtaacccaatgatgtatgatctaaaggaaaatggtgataaaattccaattacaaatgaaaacaggaaggaatttgtcaatctttattctgactacattctcaataaatcagtagaaaaacagttcaaggcttttcggagaggttttcatatggtgaccaatgaatctcccttaaagtacttattcagaccagaagaaattgaattgcttatatgtggaagccggaatctagatttccaagcactagaagaaactacagaatatgacggtggctataccagggactctgttctgattagggagttctgggaaatcgttcattcatttacagatgaacagaaaagactcttcttgcagtttacaacgggcacagacagagcacctgtgggaggactaggaaaattaaagatgattatagccaaaaatggcccagacacagaaaggttacctacatctcatacttgctttaatgtgcttttacttccggaatactcaagcaaagaaaaacttaaagagagattgttgaaggccatcacgtatgccaaaggatttggcatgctgtaa

SEQ ID NO: 1220 - DNA, 1926 bp, synthetic construct
  source 1..1926: mol_type = other DNA; note = HA-NLS-3DX.1-(GS)3-E6AP nucleic acid
atgtacccatacgatgttccagattacgctccggcggcgaaacgcgtgaaactggatggcagcggcagcggcagcgaagtgaaactggtggaaagcggcggcgatctggtgaaaccgggcggcagcctgaaactgagctgcgcggcgagcggctttacctttagccattatggcatgagctgggtgcgccagaccccggataaacgcctggaatgggtggcgaccattggcagccgcggcacctatacccattatccggatagcgtgaaaggccgctttaccattagccgcgataacgataaaaacgcgctgtatctgcagatgaacagcctgcgcaccgaagataccgcgatgtattattgcgcgcgcaaaagcgaattttattattatggcaacacctattattatagcgcgatggattattggggccagggcgcgagcgtgaccgtgagcagcggcggcggcggcagcggcggcggcgatagcggcggcggcggcagcgatattgtgctgacccagagcccggcgagcctggcggtgagcctgggccagcgcgcgaccattagctgccgcgcgagcgaaagcgtggataactatggctttagctttatgaactggtttcagcagaaaccgggccagccgccgaaactgctgatttatgcgaccagcaaccgcggcagcggcgtgccggcgcgctttagcggcagcggcagcggcaccgattttagcctgaacattcatccggtggaagaagatgatagcgcgatgtatttttgccagcagaccaaagaagtgccgtggacctttggcggcggcaccaaactggaaattaaacgcggcagcggcagcggcagcaatccatatttgagactcaaagttagacgtgaccatatcatagatgatgcacttgtccggctagagatgatcgctatggaaaatcctgcagacttgaagaagcagttgtatgtggaatttgaaggagaacaaggagttgatgagggaggtgtttccaaagaattttttcagctggttgtggaggaaatcttcaatccagatattggtatgttcacatacgatgaatctacaaaattgttttggtttaatccatcttcttttgaaactgagggtcagtttactctgattggcatagtactgggtctggctatttacaataactgtatactggatgtacattttcccatggttgtctacaggaagctaatggggaaaaaaggaacttttcgtgacttgggagactctcacccagttctatatcagagtttaaaagatttattggagtatgaagggaatgtggaagatgacatgatgatcactttccagatatcacagacagatctttttggtaacccaatgatgtatgatctaaaggaaaatggtgataaaattccaattacaaatgaaaacaggaaggaatttgtcaatctttattctgactacattctcaataaatcagtagaaaaacagttcaaggcttttcggagaggttttcatatggtgaccaatgaatctcccttaaagtacttattcagaccagaagaaattgaattgcttatatgtggaagccggaatctagatttccaagcactagaagaaactacagaatatgacggtggctataccagggactctgttctgattagggagttctgggaaatcgttcattcatttacagatgaacagaaaagactcttcttgcagtttacaacgggcacagacagagcacctgtgggaggactaggaaaattaaagatgattatagccaaaaatggcccagacacagaaaggttacctacatctcatacttgctttaatgtgcttttacttccggaatactcaagcaaagaaaaacttaaagagagattgttgaaggccatcacgtatgccaaaggatttggcatgctgtaa

SEQ ID NO: 1221 - DNA, 1932 bp, synthetic construct
  source 1..1932: mol_type = other DNA; note = HA-NLS-3DX.1-(GS)4-E6AP nucleic acid
atgtacccatacgatgttccagattacgctccggcggcgaaacgcgtgaaactggatggcagcggcagcggcagcgaagtgaaactggtggaaagcggcggcgatctggtgaaaccgggcggcagcctgaaactgagctgcgcggcgagcggctttacctttagccattatggcatgagctgggtgcgccagaccccggataaacgcctggaatgggtggcgaccattggcagccgcggcacctatacccattatccggatagcgtgaaaggccgctttaccattagccgcgataacgataaaaacgcgctgtatctgcagatgaacagcctgcgcaccgaagataccgcgatgtattattgcgcgcgcaaaagcgaattttattattatggcaacacctattattatagcgcgatggattattggggccagggcgcgagcgtgaccgtgagcagcggcggcggcggcagcggcggcggcgatagcggcggcggcggcagcgatattgtgctgacccagagcccggcgagcctggcggtgagcctgggccagcgcgcgaccattagctgccgcgcgagcgaaagcgtggataactatggctttagctttatgaactggtttcagcagaaaccgggccagccgccgaaactgctgatttatgcgaccagcaaccgcggcagcggcgtgccggcgcgctttagcggcagcggcagcggcaccgattttagcctgaacattcatccggtggaagaagatgatagcgcgatgtatttttgccagcagaccaaagaagtgccgtggacctttggcggcggcaccaaactggaaattaaacgcggcagcggcagcggcagcggcagcaatccatatttgagactcaaagttagacgtgaccatatcatagatgatgcacttgtccggctagagatgatcgctatggaaaatcctgcagacttgaagaagcagttgtatgtggaatttgaaggagaacaaggagttgatgagggaggtgtttccaaagaattttttcagctggttgtggaggaaatcttcaatccagatattggtatgttcacatacgatgaatctacaaaattgttttggtttaatccatcttcttttgaaactgagggtcagtttactctgattggcatagtactgggtctggctatttacaataactgtatactggatgtacattttcccatggttgtctacaggaagctaatggggaaaaaaggaacttttcgtgacttgggagactctcacccagttctatatcagagtttaaaagatttattggagtatgaagggaatgtggaagatgacatgatgatcactttccagatatcacagacagatctttttggtaacccaatgatgtatgatctaaaggaaaatggtgataaaattccaattacaaatgaaaacaggaaggaatttgtcaatctttattctgactacattctcaataaatcagtagaaaaacagttcaaggcttttcggagaggttttcatatggtgaccaatgaatctcccttaaagtacttattcagaccagaagaaattgaattgcttatatgtggaagccggaatctagatttccaagcactagaagaaactacagaatatgacggtggctataccagggactctgttctgattagggagttctgggaaatcgttcattcatttacagatgaacagaaaagactcttcttgcagtttacaacgggcacagacagagcacctgtgggaggactaggaaaattaaagatgattatagccaaaaatggcccagacacagaaaggttacctacatctcatacttgctttaatgtgcttttacttccggaatactcaagcaaagaaaaacttaaagagagattgttgaaggccatcacgtatgccaaaggatttggcatgctgtaa

SEQ ID NO: 1222 - DNA, 1938 bp, synthetic construct
  source 1..1938: mol_type = other DNA; note = HA-NLS-3DX.1-(GS)5-E6AP nucleic acid
atgtacccatacgatgttccagattacgctccggcggcgaaacgcgtgaaactggatggcagcggcagcggcagcgaagtgaaactggtggaaagcggcggcgatctggtgaaaccgggcggcagcctgaaactgagctgcgcggcgagcggctttacctttagccattatggcatgagctgggtgcgccagaccccggataaacgcctggaatgggtggcgaccattggcagccgcggcacctatacccattatccggatagcgtgaaaggccgctttaccattagccgcgataacgataaaaacgcgctgtatctgcagatgaacagcctgcgcaccgaagataccgcgatgtattattgcgcgcgcaaaagcgaattttattattatggcaacacctattattatagcgcgatggattattggggccagggcgcgagcgtgaccgtgagcagcggcggcggcggcagcggcggcggcgatagcggcggcggcggcagcgatattgtgctgacccagagcccggcgagcctggcggtgagcctgggccagcgcgcgaccattagctgccgcgcgagcgaaagcgtggataactatggctttagctttatgaactggtttcagcagaaaccgggccagccgccgaaactgctgatttatgcgaccagcaaccgcggcagcggcgtgccggcgcgctttagcggcagcggcagcggcaccgattttagcctgaacattcatccggtggaagaagatgatagcgcgatgtatttttgccagcagaccaaagaagtgccgtggacctttggcggcggcaccaaactggaaattaaacgcggcagcggcagcggcagcggcagcggcagcaatccatatttgagactcaaagttagacgtgaccatatcatagatgatgcacttgtccggctagagatgatcgctatggaaaatcctgcagacttgaagaagcagttgtatgtggaatttgaaggagaacaaggagttgatgagggaggtgtttccaaagaattttttcagctggttgtggaggaaatcttcaatccagatattggtatgttcacatacgatgaatctacaaaattgttttggtttaatccatcttcttttgaaactgagggtcagtttactctgattggcatagtactgggtctggctatttacaataactgtatactggatgtacattttcccatggttgtctacaggaagctaatggggaaaaaaggaacttttcgtgacttgggagactctcacccagttctatatcagagtttaaaagatttattggagtatgaagggaatgtggaagatgacatgatgatcactttccagatatcacagacagatctttttggtaacccaatgatgtatgatctaaaggaaaatggtgataaaattccaattacaaatgaaaacaggaaggaatttgtcaatctttattctgactacattctcaataaatcagtagaaaaacagttcaaggcttttcggagaggttttcatatggtgaccaatgaatctcccttaaagtacttattcagaccagaagaaattgaattgcttatatgtggaagccggaatctagatttccaagcactagaagaaactacagaatatgacggtggctataccagggactctgttctgattagggagttctgggaaatcgttcattcatttacagatgaacagaaaagactcttcttgcagtttacaacgggcacagacagagcacctgtgggaggactaggaaaattaaagatgattatagccaaaaatggcccagacacagaaaggttacctacatctcatacttgctttaatgtgcttttacttccggaatactcaagcaaagaaaaacttaaagagagattgttgaaggccatcacgtatgccaaaggatttggcatgctgtaa

SEQ ID NO: 1223 - DNA, 1944 bp, synthetic construct
  source 1..1944: mol_type = other DNA; note = HA-NLS-3DX.1-(GS)6-E6AP nucleic acid
atgtacccatacgatgttccagattacgctccggcggcgaaacgcgtgaaactggatggcagcggcagcggcagcgaagtgaaactggtggaaagcggcggcgatctggtgaaaccgggcggcagcctgaaactgagctgcgcggcgagcggctttacctttagccattatggcatgagctgggtgcgccagaccccggataaacgcctggaatgggtggcgaccattggcagccgcggcacctatacccattatccggatagcgtgaaaggccgctttaccattagccgcgataacgataaaaacgcgctgtatctgcagatgaacagcctgcgcaccgaagataccgcgatgtattattgcgcgcgcaaaagcgaattttattattatggcaacacctattattatagcgcgatggattattggggccagggcgcgagcgtgaccgtgagcagcggcggcggcggcagcggcggcggcgatagcggcggcggcggcagcgatattgtgctgacccagagcccggcgagcctggcggtgagcctgggccagcgcgcgaccattagctgccgcgcgagcgaaagcgtggataactatggctttagctttatgaactggtttcagcagaaaccgggccagccgccgaaactgctgatttatgcgaccagcaaccgcggcagcggcgtgccggcgcgctttagcggcagcggcagcggcaccgattttagcctgaacattcatccggtggaagaagatgatagcgcgatgtatttttgccagcagaccaaagaagtgccgtggacctttggcggcggcaccaaactggaaattaaacgcggcagcggcagcggcagcggcagcggcagcggcagcaatccatatttgagactcaaagttagacgtgaccatatcatagatgatgcacttgtccggctagagatgatcgctatggaaaatcctgcagacttgaagaagcagttgtatgtggaatttgaaggagaacaaggagttgatgagggaggtgtttccaaagaattttttcagctggttgtggaggaaatcttcaatccagatattggtatgttcacatacgatgaatctacaaaattgttttggtttaatccatcttcttttgaaactgagggtcagtttactctgattggcatagtactgggtctggctatttacaataactgtatactggatgtacattttcccatggttgtctacaggaagctaatggggaaaaaaggaacttttcgtgacttgggagactctcacccagttctatatcagagtttaaaagatttattggagtatgaagggaatgtggaagatgacatgatgatcactttccagatatcacagacagatctttttggtaacccaatgatgtatgatctaaaggaaaatggtgataaaattccaattacaaatgaaaacaggaaggaatttgtcaatctttattctgactacattctcaataaatcagtagaaaaacagttcaaggcttttcggagaggttttcatatggtgaccaatgaatctcccttaaagtacttattcagaccagaagaaattgaattgcttatatgtggaagccggaatctagatttccaagcactagaagaaactacagaatatgacggtggctataccagggactctgttctgattagggagttctgggaaatcgttcattcatttacagatgaacagaaaagactcttcttgcagtttacaacgggcacagacagagcacctgtgggaggactaggaaaattaaagatgattatagccaaaaatggcccagacacagaaaggttacctacatctcatacttgctttaatgtgcttttacttccggaatactcaagcaaagaaaaacttaaagagagattgttgaaggccatcacgtatgccaaaggatttggcatgctgtaa

SEQ ID NO: 1224 - DNA, 1872 bp, synthetic construct
  source 1..1872: mol_type = other DNA; note = FBXW7a-(GS)1-3DX.1 nucleic acid
aatcaggaactgctctctgtgggcagcaaaagacgacgaactggaggctctctgagaggtaacccttcctcaagccaggtagatgaagaacagatgaatcgtgtggtagaggaggaacagcaacagcaactcagacaacaagaggaggagcacactgcaaggaatggtgaagttgttggagtagaacctagacctggaggccaaaatgattcccagcaaggacagttggaagaaaacaataatagatttatttcggtagatgaggactcctcaggaaaccaagaagaacaagaggaagatgaagaacatgctggtgaacaagatgaggaggatgaggaggaggaggagatggaccaggagagtgacgattttgatcagtctgatgatagtagcagagaagatgaacatacacatactaacagtgtcacgaactccagtagtattgtggacctgcccgttcaccaactctcctccccattctatacaaaaacaacaaaaatgaaaagaaagttggaccatggttctgaggtccgctctttttctttgggaaagaaaccatgcaaagtctcagaatatacaagtaccactgggcttgtaccatgttcagcaacaccaacaacttttggggacctcagagcagccaatggccaagggcaacaacgacgccgaattacatctgtccagccacctacaggcctccaggaatggctaaaaatgtttcagagctggagtggaccagagaaattgcttgctttagatgaactcattgatagttgtgaaccaacacaagtaaaacatatgatgcaagtgatagaaccccagtttcaacgagacttcatttcattgctccctaaagagttggcactctatgtgctttcattcctggaacccaaagacctgctacaagcagctcagacatgtcgctactggagaattttggctgaagacaaccttctctggagagagaaatgcaaagaagaggggattgatgaaccattgcacatcaagagaagaaaagtaataaaaccaggtttcatacacagtccatggaaaagtgcatacatcagacagcacagaattgatactaactcgaggcgaggaggcagcgaagtgaaactggtggaaagcggcggcgatctggtgaaaccgggcggcagcctgaaactgagctgcgcggcgagcggctttacctttagccattatggcatgagctgggtgcgccagaccccggataaacgcctggaatgggtggcgaccattggcagccgcggcacctatacccattatccggatagcgtgaaaggccgctttaccattagccgcgataacgataaaaacgcgctgtatctgcagatgaacagcctgcgcaccgaagataccgcgatgtattattgcgcgcgcaaaagcgaattttattattatggcaacacctattattatagcgcgatggattattggggccagggcgcgagcgtgaccgtgagcagcggcggcggcggcagcggcggcggcgatagcggcggcggcggcagcgatattgtgctgacccagagcccggcgagcctggcggtgagcctgggccagcgcgcgaccattagctgccgcgcgagcgaaagcgtggataactatggctttagctttatgaactggtttcagcagaaaccgggccagccgccgaaactgctgatttatgcgaccagcaaccgcggcagcggcgtgccggcgcgctttagcggcagcggcagcggcaccgattttagcctgaacattcatccggtggaagaagatgatagcgcgatgtatttttgccagcagaccaaagaagtgccgtggacctttggcggcggcaccaaactggaaattaaacgctaa

SEQ ID NO: 1225 - DNA, 1878 bp, synthetic construct
  source 1..1878: mol_type = other DNA; note = FBXW7a-(GS)2-3DX.1 nucleic acid
aatcaggaactgctctctgtgggcagcaaaagacgacgaactggaggctctctgagaggtaacccttcctcaagccaggtagatgaagaacagatgaatcgtgtggtagaggaggaacagcaacagcaactcagacaacaagaggaggagcacactgcaaggaatggtgaagttgttggagtagaacctagacctggaggccaaaatgattcccagcaaggacagttggaagaaaacaataatagatttatttcggtagatgaggactcctcaggaaaccaagaagaacaagaggaagatgaagaacatgctggtgaacaagatgaggaggatgaggaggaggaggagatggaccaggagagtgacgattttgatcagtctgatgatagtagcagagaagatgaacatacacatactaacagtgtcacgaactccagtagtattgtggacctgcccgttcaccaactctcctccccattctatacaaaaacaacaaaaatgaaaagaaagttggaccatggttctgaggtccgctctttttctttgggaaagaaaccatgcaaagtctcagaatatacaagtaccactgggcttgtaccatgttcagcaacaccaacaacttttggggacctcagagcagccaatggccaagggcaacaacgacgccgaattacatctgtccagccacctacaggcctccaggaatggctaaaaatgtttcagagctggagtggaccagagaaattgcttgctttagatgaactcattgatagttgtgaaccaacacaagtaaaacatatgatgcaagtgatagaaccccagtttcaacgagacttcatttcattgctccctaaagagttggcactctatgtgctttcattcctggaacccaaagacctgctacaagcagctcagacatgtcgctactggagaattttggctgaagacaaccttctctggagagagaaatgcaaagaagaggggattgatgaaccattgcacatcaagagaagaaaagtaataaaaccaggtttcatacacagtccatggaaaagtgcatacatcagacagcacagaattgatactaactcgaggcgaggaggcagcggcagcgaagtgaaactggtggaaagcggcggcgatctggtgaaaccgggcggcagcctgaaactgagctgcgcggcgagcggctttacctttagccattatggcatgagctgggtgcgccagaccccggataaacgcctggaatgggtggcgaccattggcagccgcggcacctatacccattatccggatagcgtgaaaggccgctttaccattagccgcgataacgataaaaacgcgctgtatctgcagatgaacagcctgcgcaccgaagataccgcgatgtattattgcgcgcgcaaaagcgaattttattattatggcaacacctattattatagcgcgatggattattggggccagggcgcgagcgtgaccgtgagcagcggcggcggcggcagcggcggcggcgatagcggcggcggcggcagcgatattgtgctgacccagagcccggcgagcctggcggtgagcctgggccagcgcgcgaccattagctgccgcgcgagcgaaagcgtggataactatggctttagctttatgaactggtttcagcagaaaccgggccagccgccgaaactgctgatttatgcgaccagcaaccgcggcagcggcgtgccggcgcgctttagcggcagcggcagcggcaccgattttagcctgaacattcatccggtggaagaagatgatagcgcgatgtatttttgccagcagaccaaagaagtgccgtggacctttggcggcggcaccaaactggaaattaaacgctaa

SEQ ID NO: 1226 - DNA, 1884 bp, synthetic construct
  source 1..1884: mol_type = other DNA; note = FBXW7a-(GS)3-3DX.1 nucleic acid
aatcaggaactgctctctgtgggcagcaaaagacgacgaactggaggctctctgagaggtaacccttcctcaagccaggtagatgaagaacagatgaatcgtgtggtagaggaggaacagcaacagcaactcagacaacaagaggaggagcacactgcaaggaatggtgaagttgttggagtagaacctagacctggaggccaaaatgattcccagcaaggacagttggaagaaaacaataatagatttatttcggtagatgaggactcctcaggaaaccaagaagaacaagaggaagatgaagaacatgctggtgaacaagatgaggaggatgaggaggaggaggagatggaccaggagagtgacgattttgatcagtctgatgatagtagcagagaagatgaacatacacatactaacagtgtcacgaactccagtagtattgtggacctgcccgttcaccaactctcctccccattctatacaaaaacaacaaaaatgaaaagaaagttggaccatggttctgaggtccgctctttttctttgggaaagaaaccatgcaaagtctcagaatatacaagtaccactgggcttgtaccatgttcagcaacaccaacaacttttggggacctcagagcagccaatggccaagggcaacaacgacgccgaattacatctgtccagccacctacaggcctccaggaatggctaaaaatgtttcagagctggagtggaccagagaaattgcttgctttagatgaactcattgatagttgtgaaccaacacaagtaaaacatatgatgcaagtgatagaaccccagtttcaacgagacttcatttcattgctccctaaagagttggcactctatgtgctttcattcctggaacccaaagacctgctacaagcagctcagacatgtcgctactggagaattttggctgaagacaaccttctctggagagagaaatgcaaagaagaggggattgatgaaccattgcacatcaagagaagaaaagtaataaaaccaggtttcatacacagtccatggaaaagtgcatacatcagacagcacagaattgatactaactcgaggcgaggaggcagcggcagcggcagcgaagtgaaactggtggaaagcggcggcgatctggtgaaaccgggcggcagcctgaaactgagctgcgcggcgagcggctttacctttagccattatggcatgagctgggtgcgccagaccccggataaacgcctggaatgggtggcgaccattggcagccgcggcacctatacccattatccggatagcgtgaaaggccgctttaccattagccgcgataacgataaaaacgcgctgtatctgcagatgaacagcctgcgcaccgaagataccgcgatgtattattgcgcgcgcaaaagcgaattttattattatggcaacacctattattatagcgcgatggattattggggccagggcgcgagcgtgaccgtgagcagcggcggcggcggcagcggcggcggcgatagcggcggcggcggcagcgatattgtgctgacccagagcccggcgagcctggcggtgagcctgggccagcgcgcgaccattagctgccgcgcgagcgaaagcgtggataactatggctttagctttatgaactggtttcagcagaaaccgggccagccgccgaaactgctgatttatgcgaccagcaaccgcggcagcggcgtgccggcgcgctttagcggcagcggcagcggcaccgattttagcctgaacattcatccggtggaagaagatgatagcgcgatgtatttttgccagcagaccaaagaagtgccgtggacctttggcggcggcaccaaactggaaattaaacgctaa

SEQ ID NO: 1227 - DNA, 1890 bp, synthetic construct
  source 1..1890: mol_type = other DNA; note = FBXW7a-(GS)4-3DX.1 nucleic acid
aatcaggaactgctctctgtgggcagcaaaagacgacgaactggaggctctctgagaggtaacccttcctcaagccaggtagatgaagaacagatgaatcgtgtggtagaggaggaacagcaacagcaactcagacaacaagaggaggagcacactgcaaggaatggtgaagttgttggagtagaacctagacctggaggccaaaatgattcccagcaaggacagttggaagaaaacaataatagatttatttcggtagatgaggactcctcaggaaaccaagaagaacaagaggaagatgaagaacatgctggtgaacaagatgaggaggatgaggaggaggaggagatggaccaggagagtgacgattttgatcagtctgatgatagtagcagagaagatgaacatacacatactaacagtgtcacgaactccagtagtattgtggacctgcccgttcaccaactctcctccccattctatacaaaaacaacaaaaatgaaaagaaagttggaccatggttctgaggtccgctctttttctttgggaaagaaaccatgcaaagtctcagaatatacaagtaccactgggcttgtaccatgttcagcaacaccaacaacttttggggacctcagagcagccaatggccaagggcaacaacgacgccgaattacatctgtccagccacctacaggcctccaggaatggctaaaaatgtttcagagctggagtggaccagagaaattgcttgctttagatgaactcattgatagttgtgaaccaacacaagtaaaacatatgatgcaagtgatagaaccccagtttcaacgagacttcatttcattgctccctaaagagttggcactctatgtgctttcattcctggaacccaaagacctgctacaagcagctcagacatgtcgctactggagaattttggctgaagacaaccttctctggagagagaaatgcaaagaagaggggattgatgaaccattgcacatcaagagaagaaaagtaataaaaccaggtttcatacacagtccatggaaaagtgcatacatcagacagcacagaattgatactaactcgaggcgaggaggcagcggcagcggcagcggcagcgaagtgaaactggtggaaagcggcggcgatctggtgaaaccgggcggcagcctgaaactgagctgcgcggcgagcggctttacctttagccattatggcatgagctgggtgcgccagaccccggataaacgcctggaatgggtggcgaccattggcagccgcggcacctatacccattatccggatagcgtgaaaggccgctttaccattagccgcgataacgataaaaacgcgctgtatctgcagatgaacagcctgcgcaccgaagataccgcgatgtattattgcgcgcgcaaaagcgaattttattattatggcaacacctattattatagcgcgatggattattggggccagggcgcgagcgtgaccgtgagcagcggcggcggcggcagcggcggcggcgatagcggcggcggcggcagcgatattgtgctgacccagagcccggcgagcctggcggtgagcctgggccagcgcgcgaccattagctgccgcgcgagcgaaagcgtggataactatggctttagctttatgaactggtttcagcagaaaccgggccagccgccgaaactgctgatttatgcgaccagcaaccgcggcagcggcgtgccggcgcgctttagcggcagcggcagcggcaccgattttagcctgaacattcatccggtggaagaagatgatagcgcgatgtatttttgccagcagaccaaagaagtgccgtggacctttggcggcggcaccaaactggaaattaaacgctaa

SEQ ID NO: 1228 - DNA, 1896 bp, synthetic construct
  source 1..1896: mol_type = other DNA; note = FBXW7a-(GS)5-3DX.1 nucleic acid
aatcaggaactgctctctgtgggcagcaaaagacgacgaactggaggctctctgagaggtaacccttcctcaagccaggtagatgaagaacagatgaatcgtgtggtagaggaggaacagcaacagcaactcagacaacaagaggaggagcacactgcaaggaatggtgaagttgttggagtagaacctagacctggaggccaaaatgattcccagcaaggacagttggaagaaaacaataatagatttatttcggtagatgaggactcctcaggaaaccaagaagaacaagaggaagatgaagaacatgctggtgaacaagatgaggaggatgaggaggaggaggagatggaccaggagagtgacgattttgatcagtctgatgatagtagcagagaagatgaacatacacatactaacagtgtcacgaactccagtagtattgtggacctgcccgttcaccaactctcctccccattctatacaaaaacaacaaaaatgaaaagaaagttggaccatggttctgaggtccgctctttttctttgggaaagaaaccatgcaaagtctcagaatatacaagtaccactgggcttgtaccatgttcagcaacaccaacaacttttggggacctcagagcagccaatggccaagggcaacaacgacgccgaattacatctgtccagccacctacaggcctccaggaatggctaaaaatgtttcagagctggagtggaccagagaaattgcttgctttagatgaactcattgatagttgtgaaccaacacaagtaaaacatatgatgcaagtgatagaaccccagtttcaacgagacttcatttcattgctccctaaagagttggcactctatgtgctttcattcctggaacccaaagacctgctacaagcagctcagacatgtcgctactggagaattttggctgaagacaaccttctctggagagagaaatgcaaagaagaggggattgatgaaccattgcacatcaagagaagaaaagtaataaaaccaggtttcatacacagtccatggaaaagtgcatacatcagacagcacagaattgatactaactcgaggcgaggaggcagcggcagcggcagcggcagcggcagcgaagtgaaactggtggaaagcggcggcgatctggtgaaaccgggcggcagcctgaaactgagctgcgcggcgagcggctttacctttagccattatggcatgagctgggtgcgccagaccccggataaacgcctggaatgggtggcgaccattggcagccgcggcacctatacccattatccggatagcgtgaaaggccgctttaccattagccgcgataacgataaaaacgcgctgtatctgcagatgaacagcctgcgcaccgaagataccgcgatgtattattgcgcgcgcaaaagcgaattttattattatggcaacacctattattatagcgcgatggattattggggccagggcgcgagcgtgaccgtgagcagcggcggcggcggcagcggcggcggcgatagcggcggcggcggcagcgatattgtgctgacccagagcccggcgagcctggcggtgagcctgggccagcgcgcgaccattagctgccgcgcgagcgaaagcgtggataactatggctttagctttatgaactggtttcagcagaaaccgggccagccgccgaaactgctgatttatgcgaccagcaaccgcggcagcggcgtgccggcgcgctttagcggcagcggcagcggcaccgattttagcctgaacattcatccggtggaagaagatgatagcgcgatgtatttttgccagcagaccaaagaagtgccgtggacctttggcggcggcaccaaactggaaattaaacgctaa

SEQ ID NO: 1229 - DNA, 1902 bp, synthetic construct
  source 1..1902: mol_type = other DNA; note = FBXW7a-(GS)6-3DX.1 nucleic acid
aatcaggaactgctctctgtgggcagcaaaagacgacgaactggaggctctctgagaggtaacccttcctcaagccaggtagatgaagaacagatgaatcgtgtggtagaggaggaacagcaacagcaactcagacaacaagaggaggagcacactgcaaggaatggtgaagttgttggagtagaacctagacctggaggccaaaatgattcccagcaaggacagttggaagaaaacaataatagatttatttcggtagatgaggactcctcaggaaaccaagaagaacaagaggaagatgaagaacatgctggtgaacaagatgaggaggatgaggaggaggaggagatggaccaggagagtgacgattttgatcagtctgatgatagtagcagagaagatgaacatacacatactaacagtgtcacgaactccagtagtattgtggacctgcccgttcaccaactctcctccccattctatacaaaaacaacaaaaatgaaaagaaagttggaccatggttctgaggtccgctctttttctttgggaaagaaaccatgcaaagtctcagaatatacaagtaccactgggcttgtaccatgttcagcaacaccaacaacttttggggacctcagagcagccaatggccaagggcaacaacgacgccgaattacatctgtccagccacctacaggcctccaggaatggctaaaaatgtttcagagctggagtggaccagagaaattgcttgctttagatgaactcattgatagttgtgaaccaacacaagtaaaacatatgatgcaagtgatagaaccccagtttcaacgagacttcatttcattgctccctaaagagttggcactctatgtgctttcattcctggaacccaaagacctgctacaagcagctcagacatgtcgctactggagaattttggctgaagacaaccttctctggagagagaaatgcaaagaagaggggattgatgaaccattgcacatcaagagaagaaaagtaataaaaccaggtttcatacacagtccatggaaaagtgcatacatcagacagcacagaattgatactaactcgaggcgaggaggcagcggcagcggcagcggcagcggcagcggcagcgaagtgaaactggtggaaagcggcggcgatctggtgaaaccgggcggcagcctgaaactgagctgcgcggcgagcggctttacctttagccattatggcatgagctgggtgcgccagaccccggataaacgcctggaatgggtggcgaccattggcagccgcggcacctatacccattatccggatagcgtgaaaggccgctttaccattagccgcgataacgataaaaacgcgctgtatctgcagatgaacagcctgcgcaccgaagataccgcgatgtattattgcgcgcgcaaaagcgaattttattattatggcaacacctattattatagcgcgatggattattggggccagggcgcgagcgtgaccgtgagcagcggcggcggcggcagcggcggcggcgatagcggcggcggcggcagcgatattgtgctgacccagagcccggcgagcctggcggtgagcctgggccagcgcgcgaccattagctgccgcgcgagcgaaagcgtggataactatggctttagctttatgaactggtttcagcagaaaccgggccagccgccgaaactgctgatttatgcgaccagcaaccgcggcagcggcgtgccggcgcgctttagcggcagcggcagcggcaccgattttagcctgaacattcatccggtggaagaagatgatagcgcgatgtatttttgccagcagaccaaagaagtgccgtggacctttggcggcggcaccaaactggaaattaaacgctaa

SEQ ID NO: 1230 - DNA, 1902 bp, synthetic construct
  source 1..1902: mol_type = other DNA; note = HA-FBXW7a-(GS)1-3DX.1 nucleic acid
atgtacccatacgatgttccagattacgctaatcaggaactgctctctgtgggcagcaaaagacgacgaactggaggctctctgagaggtaacccttcctcaagccaggtagatgaagaacagatgaatcgtgtggtagaggaggaacagcaacagcaactcagacaacaagaggaggagcacactgcaaggaatggtgaagttgttggagtagaacctagacctggaggccaaaatgattcccagcaaggacagttggaagaaaacaataatagatttatttcggtagatgaggactcctcaggaaaccaagaagaacaagaggaagatgaagaacatgctggtgaacaagatgaggaggatgaggaggaggaggagatggaccaggagagtgacgattttgatcagtctgatgatagtagcagagaagatgaacatacacatactaacagtgtcacgaactccagtagtattgtggacctgcccgttcaccaactctcctccccattctatacaaaaacaacaaaaatgaaaagaaagttggaccatggttctgaggtccgctctttttctttgggaaagaaaccatgcaaagtctcagaatatacaagtaccactgggcttgtaccatgttcagcaacaccaacaacttttggggacctcagagcagccaatggccaagggcaacaacgacgccgaattacatctgtccagccacctacaggcctccaggaatggctaaaaatgtttcagagctggagtggaccagagaaattgcttgctttagatgaactcattgatagttgtgaaccaacacaagtaaaacatatgatgcaagtgatagaaccccagtttcaacgagacttcatttcattgctccctaaagagttggcactctatgtgctttcattcctggaacccaaagacctgctacaagcagctcagacatgtcgctactggagaattttggctgaagacaaccttctctggagagagaaatgcaaagaagaggggattgatgaaccattgcacatcaagagaagaaaagtaataaaaccaggtttcatacacagtccatggaaaagtgcatacatcagacagcacagaattgatactaactcgaggcgaggaggcagcgaagtgaaactggtggaaagcggcggcgatctggtgaaaccgggcggcagcctgaaactgagctgcgcggcgagcggctttacctttagccattatggcatgagctgggtgcgccagaccccggataaacgcctggaatgggtggcgaccattggcagccgcggcacctatacccattatccggatagcgtgaaaggccgctttaccattagccgcgataacgataaaaacgcgctgtatctgcagatgaacagcctgcgcaccgaagataccgcgatgtattattgcgcgcgcaaaagcgaattttattattatggcaacacctattattatagcgcgatggattattggggccagggcgcgagcgtgaccgtgagcagcggcggcggcggcagcggcggcggcgatagcggcggcggcggcagcgatattgtgctgacccagagcccggcgagcctggcggtgagcctgggccagcgcgcgaccattagctgccgcgcgagcgaaagcgtggataactatggctttagctttatgaactggtttcagcagaaaccgggccagccgccgaaactgctgatttatgcgaccagcaaccgcggcagcggcgtgccggcgcgctttagcggcagcggcagcggcaccgattttagcctgaacattcatccggtggaagaagatgatagcgcgatgtatttttgccagcagaccaaagaagtgccgtggacctttggcggcggcaccaaactggaaattaaacgctaa

SEQ ID NO: 1231 - DNA, 1908 bp, synthetic construct
  source 1..1908: mol_type = other DNA; note = HA-FBXW7a-(GS)2-3DX.1 nucleic acid
atgtacccatacgatgttccagattacgctaatcaggaactgctctctgtgggcagcaaaagacgacgaactggaggctctctgagaggtaacccttcctcaagccaggtagatgaagaacagatgaatcgtgtggtagaggaggaacagcaacagcaactcagacaacaagaggaggagcacactgcaaggaatggtgaagttgttggagtagaacctagacctggaggccaaaatgattcccagcaaggacagttggaagaaaacaataatagatttatttcggtagatgaggactcctcaggaaaccaagaagaacaagaggaagatgaagaacatgctggtgaacaagatgaggaggatgaggaggaggaggagatggaccaggagagtgacgattttgatcagtctgatgatagtagcagagaagatgaacatacacatactaacagtgtcacgaactccagtagtattgtggacctgcccgttcaccaactctcctccccattctatacaaaaacaacaaaaatgaaaagaaagttggaccatggttctgaggtccgctctttttctttgggaaagaaaccatgcaaagtctcagaatatacaagtaccactgggcttgtaccatgttcagcaacaccaacaacttttggggacctcagagcagccaatggccaagggcaacaacgacgccgaattacatctgtccagccacctacaggcctccaggaatggctaaaaatgtttcagagctggagtggaccagagaaattgcttgctttagatgaactcattgatagttgtgaaccaacacaagtaaaacatatgatgcaagtgatagaaccccagtttcaacgagacttcatttcattgctccctaaagagttggcactctatgtgctttcattcctggaacccaaagacctgctacaagcagctcagacatgtcgctactggagaattttggctgaagacaaccttctctggagagagaaatgcaaagaagaggggattgatgaaccattgcacatcaagagaagaaaagtaataaaaccaggtttcatacacagtccatggaaaagtgcatacatcagacagcacagaattgatactaactcgaggcgaggaggcagcggcagcgaagtgaaactggtggaaagcggcggcgatctggtgaaaccgggcggcagcctgaaactgagctgcgcggcgagcggctttacctttagccattatggcatgagctgggtgcgccagaccccggataaacgcctggaatgggtggcgaccattggcagccgcggcacctatacccattatccggatagcgtgaaaggccgctttaccattagccgcgataacgataaaaacgcgctgtatctgcagatgaacagcctgcgcaccgaagataccgcgatgtattattgcgcgcgcaaaagcgaattttattattatggcaacacctattattatagcgcgatggattattggggccagggcgcgagcgtgaccgtgagcagcggcggcggcggcagcggcggcggcgatagcggcggcggcggcagcgatattgtgctgacccagagcccggcgagcctggcggtgagcctgggccagcgcgcgaccattagctgccgcgcgagcgaaagcgtggataactatggctttagctttatgaactggtttcagcagaaaccgggccagccgccgaaactgctgatttatgcgaccagcaaccgcggcagcggcgtgccggcgcgctttagcggcagcggcagcggcaccgattttagcctgaacattcatccggtggaagaagatgatagcgcgatgtatttttgccagcagaccaaagaagtgccgtggacctttggcggcggcaccaaactggaaattaaacgctaa

SEQ ID NO: 1232 - DNA, 1914 bp, synthetic construct
  source 1..1914: mol_type = other DNA; note = HA-FBXW7a-(GS)3-3DX.1 nucleic acid
atgtacccatacgatgttccagattacgctaatcaggaactgctctctgtgggcagcaaaagacgacgaactggaggctctctgagaggtaacccttcctcaagccaggtagatgaagaacagatgaatcgtgtggtagaggaggaacagcaacagcaactcagacaacaagaggaggagcacactgcaaggaatggtgaagttgttggagtagaacctagacctggaggccaaaatgattcccagcaaggacagttggaagaaaacaataatagatttatttcggtagatgaggactcctcaggaaaccaagaagaacaagaggaagatgaagaacatgctggtgaacaagatgaggaggatgaggaggaggaggagatggaccaggagagtgacgattttgatcagtctgatgatagtagcagagaagatgaacatacacatactaacagtgtcacgaactccagtagtattgtggacctgcccgttcaccaactctcctccccattctatacaaaaacaacaaaaatgaaaagaaagttggaccatggttctgaggtccgctctttttctttgggaaagaaaccatgcaaagtctcagaatatacaagtaccactgggcttgtaccatgttcagcaacaccaacaacttttggggacctcagagcagccaatggccaagggcaacaacgacgccgaattacatctgtccagccacctacaggcctccaggaatggctaaaaatgtttcagagctggagtggaccagagaaattgcttgctttagatgaactcattgatagttgtgaaccaacacaagtaaaacatatgatgcaagtgatagaaccccagtttcaacgagacttcatttcattgctccctaaagagttggcactctatgtgctttcattcctggaacccaaagacctgctacaagcagctcagacatgtcgctactggagaattttggctgaagacaaccttctctggagagagaaatgcaaagaagaggggattgatgaaccattgcacatcaagagaagaaaagtaataaaaccaggtttcatacacagtccatggaaaagtgcatacatcagacagcacagaattgatactaactcgaggcgaggaggcagcggcagcggcagcgaagtgaaactggtggaaagcggcggcgatctggtgaaaccgggcggcagcctgaaactgagctgcgcggcgagcggctttacctttagccattatggcatgagctgggtgcgccagaccccggataaacgcctggaatgggtggcgaccattggcagccgcggcacctatacccattatccggatagcgtgaaaggccgctttaccattagccgcgataacgataaaaacgcgctgtatctgcagatgaacagcctgcgcaccgaagataccgcgatgtattattgcgcgcgcaaaagcgaattttattattatggcaacacctattattatagcgcgatggattattggggccagggcgcgagcgtgaccgtgagcagcggcggcggcggcagcggcggcggcgatagcggcggcggcggcagcgatattgtgctgacccagagcccggcgagcctggcggtgagcctgggccagcgcgcgaccattagctgccgcgcgagcgaaagcgtggataactatggctttagctttatgaactggtttcagcagaaaccgggccagccgccgaaactgctgatttatgcgaccagcaaccgcggcagcggcgtgccggcgcgctttagcggcagcggcagcggcaccgattttagcctgaacattcatccggtggaagaagatgatagcgcgatgtatttttgccagcagaccaaagaagtgccgtggacctttggcggcggcaccaaactggaaattaaacgctaa

SEQ ID NO: 1233 - DNA, 1920 bp, synthetic construct
  source 1..1920: mol_type = other DNA; note = HA-FBXW7a-(GS)4-3DX.1 nucleic acid
atgtacccatacgatgttccagattacgctaatcaggaactgctctctgtgggcagcaaaagacgacgaactggaggctctctgagaggtaacccttcctcaagccaggtagatgaagaacagatgaatcgtgtggtagaggaggaacagcaacagcaactcagacaacaagaggaggagcacactgcaaggaatggtgaagttgttggagtagaacctagacctggaggccaaaatgattcccagcaaggacagttggaagaaaacaataatagatttatttcggtagatgaggactcctcaggaaaccaagaagaacaagaggaagatgaagaacatgctggtgaacaagatgaggaggatgaggaggaggaggagatggaccaggagagtgacgattttgatcagtctgatgatagtagcagagaagatgaacatacacatactaacagtgtcacgaactccagtagtattgtggacctgcccgttcaccaactctcctccccattctatacaaaaacaacaaaaatgaaaagaaagttggaccatggttctgaggtccgctctttttctttgggaaagaaaccatgcaaagtctcagaatatacaagtaccactgggcttgtaccatgttcagcaacaccaacaacttttggggacctcagagcagccaatggccaagggcaacaacgacgccgaattacatctgtccagccacctacaggcctccaggaatggctaaaaatgtttcagagctggagtggaccagagaaattgcttgctttagatgaactcattgatagttgtgaaccaacacaagtaaaacatatgatgcaagtgatagaaccccagtttcaacgagacttcatttcattgctccctaaagagttggcactctatgtgctttcattcctggaacccaaagacctgctacaagcagctcagacatgtcgctactggagaattttggctgaagacaaccttctctggagagagaaatgcaaagaagaggggattgatgaaccattgcacatcaagagaagaaaagtaataaaaccaggtttcatacacagtccatggaaaagtgcatacatcagacagcacagaattgatactaactcgaggcgaggaggcagcggcagcggcagcggcagcgaagtgaaactggtggaaagcggcggcgatctggtgaaaccgggcggcagcctgaaactgagctgcgcggcgagcggctttacctttagccattatggcatgagctgggtgcgccagaccccggataaacgcctggaatgggtggcgaccattggcagccgcggcacctatacccattatccggatagcgtgaaaggccgctttaccattagccgcgataacgataaaaacgcgctgtatctgcagatgaacagcctgcgcaccgaagataccgcgatgtattattgcgcgcgcaaaagcgaattttattattatggcaacacctattattatagcgcgatggattattggggccagggcgcgagcgtgaccgtgagcagcggcggcggcggcagcggcggcggcgatagcggcggcggcggcagcgatattgtgctgacccagagcccggcgagcctggcggtgagcctgggccagcgcgcgaccattagctgccgcgcgagcgaaagcgtggataactatggctttagctttatgaactggtttcagcagaaaccgggccagccgccgaaactgctgatttatgcgaccagcaaccgcggcagcggcgtgccggcgcgctttagcggcagcggcagcggcaccgattttagcctgaacattcatccggtggaagaagatgatagcgcgatgtatttttgccagcagaccaaagaagtgccgtggacctttggcggcggcaccaaactggaaattaaacgctaa

SEQ ID NO: 1234 - DNA, 1926 bp, synthetic construct
  source 1..1926: mol_type = other DNA; note = HA-FBXW7a-(GS)5-3DX.1 nucleic acid
atgtacccatacgatgttccagattacgctaatcaggaactgctctctgtgggcagcaaaagacgacgaactggaggctctctgagaggtaacccttcctcaagccaggtagatgaagaacagatgaatcgtgtggtagaggaggaacagcaacagcaactcagacaacaagaggaggagcacactgcaaggaatggtgaagttgttggagtagaacctagacctggaggccaaaatgattcccagcaaggacagttggaagaaaacaataatagatttatttcggtagatgaggactcctcaggaaaccaagaagaacaagaggaagatgaagaacatgctggtgaacaagatgaggaggatgaggaggaggaggagatggaccaggagagtgacgattttgatcagtctgatgatagtagcagagaagatgaacatacacatactaacagtgtcacgaactccagtagtattgtggacctgcccgttcaccaactctcctccccattctatacaaaaacaacaaaaatgaaaagaaagttggaccatggttctgaggtccgctctttttctttgggaaagaaaccatgcaaagtctcagaatatacaagtaccactgggcttgtaccatgttcagcaacaccaacaacttttggggacctcagagcagccaatggccaagggcaacaacgacgccgaattacatctgtccagccacctacaggcctccaggaatggctaaaaatgtttcagagctggagtggaccagagaaattgcttgctttagatgaactcattgatagttgtgaaccaacacaagtaaaacatatgatgcaagtgatagaaccccagtttcaacgagacttcatttcattgctccctaaagagttggcactctatgtgctttcattcctggaacccaaagacctgctacaagcagctcagacatgtcgctactggagaattttggctgaagacaaccttctctggagagagaaatgcaaagaagaggggattgatgaaccattgcacatcaagagaagaaaagtaataaaaccaggtttcatacacagtccatggaaaagtgcatacatcagacagcacagaattgatactaactcgaggcgaggaggcagcggcagcggcagcggcagcggcagcgaagtgaaactggtggaaagcggcggcgatctggtgaaaccgggcggcagcctgaaactgagctgcgcggcgagcggctttacctttagccattatggcatgagctgggtgcgccagaccccggataaacgcctggaatgggtggcgaccattggcagccgcggcacctatacccattatccggatagcgtgaaaggccgctttaccattagccgcgataacgataaaaacgcgctgtatctgcagatgaacagcctgcgcaccgaagataccgcgatgtattattgcgcgcgcaaaagcgaattttattattatggcaacacctattattatagcgcgatggattattggggccagggcgcgagcgtgaccgtgagcagcggcggcggcggcagcggcggcggcgatagcggcggcggcggcagcgatattgtgctgacccagagcccggcgagcctggcggtgagcctgggccagcgcgcgaccattagctgccgcgcgagcgaaagcgtggataactatggctttagctttatgaactggtttcagcagaaaccgggccagccgccgaaactgctgatttatgcgaccagcaaccgcggcagcggcgtgccggcgcgctttagcggcagcggcagcggcaccgattttagcctgaacattcatccggtggaagaagatgatagcgcgatgtatttttgccagcagaccaaagaagtgccgtggacctttggcggcggcaccaaactggaaattaaacgctaa

SEQ ID NO: 1235 - DNA, 1932 bp, synthetic construct
  source 1..1932: mol_type = other DNA; note = HA-FBXW7a-(GS)6-3DX.1 nucleic acid
atgtacccatacgatgttccagattacgctaatcaggaactgctctctgtgggcagcaaaagacgacgaactggaggctctctgagaggtaacccttcctcaagccaggtagatgaagaacagatgaatcgtgtggtagaggaggaacagcaacagcaactcagacaacaagaggaggagcacactgcaaggaatggtgaagttgttggagtagaacctagacctggaggccaaaatgattcccagcaaggacagttggaagaaaacaataatagatttatttcggtagatgaggactcctcaggaaaccaagaagaacaagaggaagatgaagaacatgctggtgaacaagatgaggaggatgaggaggaggaggagatggaccaggagagtgacgattttgatcagtctgatgatagtagcagagaagatgaacatacacatactaacagtgtcacgaactccagtagtattgtggacctgcccgttcaccaactctcctccccattctatacaaaaacaacaaaaatgaaaagaaagttggaccatggttctgaggtccgctctttttctttgggaaagaaaccatgcaaagtctcagaatatacaagtaccactgggcttgtaccatgttcagcaacaccaacaacttttggggacctcagagcagccaatggccaagggcaacaacgacgccgaattacatctgtccagccacctacaggcctccaggaatggctaaaaatgtttcagagctggagtggaccagagaaattgcttgctttagatgaactcattgatagttgtgaaccaacacaagtaaaacatatgatgcaagtgatagaaccccagtttcaacgagacttcatttcattgctccctaaagagttggcactctatgtgctttcattcctggaacccaaagacctgctacaagcagctcagacatgtcgctactggagaattttggctgaagacaaccttctctggagagagaaatgcaaagaagaggggattgatgaaccattgcacatcaagagaagaaaagtaataaaaccaggtttcatacacagtccatggaaaagtgcatacatcagacagcacagaattgatactaactcgaggcgaggaggcagcggcagcggcagcggcagcggcagcggcagcgaagtgaaactggtggaaagcggcggcgatctggtgaaaccgggcggcagcctgaaactgagctgcgcggcgagcggctttacctttagccattatggcatgagctgggtgcgccagaccccggataaacgcctggaatgggtggcgaccattggcagccgcggcacctatacccattatccggatagcgtgaaaggccgctttaccattagccgcgataacgataaaaacgcgctgtatctgcagatgaacagcctgcgcaccgaagataccgcgatgtattattgcgcgcgcaaaagcgaattttattattatggcaacacctattattatagcgcgatggattattggggccagggcgcgagcgtgaccgtgagcagcggcggcggcggcagcggcggcggcgatagcggcggcggcggcagcgatattgtgctgacccagagcccggcgagcctggcggtgagcctgggccagcgcgcgaccattagctgccgcgcgagcgaaagcgtggataactatggctttagctttatgaactggtttcagcagaaaccgggccagccgccgaaactgctgatttatgcgaccagcaaccgcggcagcggcgtgccggcgcgctttagcggcagcggcagcggcaccgattttagcctgaacattcatccggtggaagaagatgatagcgcgatgtatttttgccagcagaccaaagaagtgccgtggacctttggcggcggcaccaaactggaaattaaacgctaa

SEQ ID NO: 1236 - DNA, 1779 bp, synthetic construct
  source 1..1779: mol_type = other DNA; note = NLS-Keap1-(GS)1-3DX.1 nucleic acid
ccggcggcgaaacgcgtgaaactggatggcagcggcagcggcagccagccagatcccaggcctagcggggctggggcctgctgccgattcctgcccctgcagtcacagtgccctgagggggcaggggacgcggtgatgtacgcctccactgagtgcaaggcggaggtgacgccctcccagcatggcaaccgcaccttcagctacaccctggaggatcataccaagcaggcctttggcatcatgaacgagctgcggctcagccagcagctgtgtgacgtcacactgcaggtcaagtaccaggatgcaccggccgcccagttcatggcccacaaggtggtgctggcctcatccagccctgtcttcaaggccatgttcaccaacgggctgcgggagcagggcatggaggtggtgtccattgagggtatccaccccaaggtcatggagcgcctcattgaattcgcctacacggcctccatctccatgggcgagaagtgtgtcctccacgtcatgaacggtgctgtcatgtaccagatcgacagcgttgtccgtgcctgcagtgacttcctggtgcagcagctggaccccagcaatgccatcggcatcgccaacttcgctgagcagattggctgtgtggagttgcaccagcgtgcccgggagtacatctacatgcattttggggaggtggccaagcaagaggagttcttcaacctgtcccactgccaactggtgaccctcatcagccgggacgacctgaacgtgcgctgcgagtccgaggtcttccacgcctgcatcaactgggtcaagtacgactgcgaacagcgacggttctacgtccaggcgctgctgcgggccgtgcgctgccactcgttgacgccgaacttcctgcagatgcagctgcagaagtgcgagatcctgcagtccgactcccgctgcaaggactacctggtcaagatcttcgaggagctcaccctgcacaagcccacgcaggtgatgccctgccgggcgcccggcagcgaagtgaaactggtggaaagcggcggcgatctggtgaaaccgggcggcagcctgaaactgagctgcgcggcgagcggctttacctttagccattatggcatgagctgggtgcgccagaccccggataaacgcctggaatgggtggcgaccattggcagccgcggcacctatacccattatccggatagcgtgaaaggccgctttaccattagccgcgataacgataaaaacgcgctgtatctgcagatgaacagcctgcgcaccgaagataccgcgatgtattattgcgcgcgcaaaagcgaattttattattatggcaacacctattattatagcgcgatggattattggggccagggcgcgagcgtgaccgtgagcagcggcggcggcggcagcggcggcggcgatagcggcggcggcggcagcgatattgtgctgacccagagcccggcgagcctggcggtgagcctgggccagcgcgcgaccattagctgccgcgcgagcgaaagcgtggataactatggctttagctttatgaactggtttcagcagaaaccgggccagccgccgaaactgctgatttatgcgaccagcaaccgcggcagcggcgtgccggcgcgctttagcggcagcggcagcggcaccgattttagcctgaacattcatccggtggaagaagatgatagcgcgatgtatttttgccagcagaccaaagaagtgccgtggacctttggcggcggcaccaaactggaaattaaacgctaa

SEQ ID NO: 1237 - DNA, 1785 bp, synthetic construct
  source 1..1785: mol_type = other DNA; note = NLS-Keap1-(GS)2-3DX.1 nucleic acid
ccggcggcgaaacgcgtgaaactggatggcagcggcagcggcagccagccagatcccaggcctagcggggctggggcctgctgccgattcctgcccctgcagtcacagtgccctgagggggcaggggacgcggtgatgtacgcctccactgagtgcaaggcggaggtgacgccctcccagcatggcaaccgcaccttcagctacaccctggaggatcataccaagcaggcctttggcatcatgaacgagctgcggctcagccagcagctgtgtgacgtcacactgcaggtcaagtaccaggatgcaccggccgcccagttcatggcccacaaggtggtgctggcctcatccagccctgtcttcaaggccatgttcaccaacgggctgcgggagcagggcatggaggtggtgtccattgagggtatccaccccaaggtcatggagcgcctcattgaattcgcctacacggcctccatctccatgggcgagaagtgtgtcctccacgtcatgaacggtgctgtcatgtaccagatcgacagcgttgtccgtgcctgcagtgacttcctggtgcagcagctggaccccagcaatgccatcggcatcgccaacttcgctgagcagattggctgtgtggagttgcaccagcgtgcccgggagtacatctacatgcattttggggaggtggccaagcaagaggagttcttcaacctgtcccactgccaactggtgaccctcatcagccgggacgacctgaacgtgcgctgcgagtccgaggtcttccacgcctgcatcaactgggtcaagtacgactgcgaacagcgacggttctacgtccaggcgctgctgcgggccgtgcgctgccactcgttgacgccgaacttcctgcagatgcagctgcagaagtgcgagatcctgcagtccgactcccgctgcaaggactacctggtcaagatcttcgaggagctcaccctgcacaagcccacgcaggtgatgccctgccgggcgcccggcagcggcagcgaagtgaaactggtggaaagcggcggcgatctggtgaaaccgggcggcagcctgaaactgagctgcgcggcgagcggctttacctttagccattatggcatgagctgggtgcgccagaccccggataaacgcctggaatgggtggcgaccattggcagccgcggcacctatacccattatccggatagcgtgaaaggccgctttaccattagccgcgataacgataaaaacgcgctgtatctgcagatgaacagcctgcgcaccgaagataccgcgatgtattattgcgcgcgcaaaagcgaattttattattatggcaacacctattattatagcgcgatggattattggggccagggcgcgagcgtgaccgtgagcagcggcggcggcggcagcggcggcggcgatagcggcggcggcggcagcgatattgtgctgacccagagcccggcgagcctggcggtgagcctgggccagcgcgcgaccattagctgccgcgcgagcgaaagcgtggataactatggctttagctttatgaactggtttcagcagaaaccgggccagccgccgaaactgctgatttatgcgaccagcaaccgcggcagcggcgtgccggcgcgctttagcggcagcggcagcggcaccgattttagcctgaacattcatccggtggaagaagatgatagcgcgatgtatttttgccagcagaccaaagaagtgccgtggacctttggcggcggcaccaaactggaaattaaacgctaa

SEQ ID NO: 1238 - DNA, 1791 bp, synthetic construct
  source 1..1791: mol_type = other DNA; note = NLS-Keap1-(GS)3-3DX.1 nucleic acid
ccggcggcgaaacgcgtgaaactggatggcagcggcagcggcagccagccagatcccaggcctagcggggctggggcctgctgccgattcctgcccctgcagtcacagtgccctgagggggcaggggacgcggtgatgtacgcctccactgagtgcaaggcggaggtgacgccctcccagcatggcaaccgcaccttcagctacaccctggaggatcataccaagcaggcctttggcatcatgaacgagctgcggctcagccagcagctgtgtgacgtcacactgcaggtcaagtaccaggatgcaccggccgcccagttcatggcccacaaggtggtgctggcctcatccagccctgtcttcaaggccatgttcaccaacgggctgcgggagcagggcatggaggtggtgtccattgagggtatccaccccaaggtcatggagcgcctcattgaattcgcctacacggcctccatctccatgggcgagaagtgtgtcctccacgtcatgaacggtgctgtcatgtaccagatcgacagcgttgtccgtgcctgcagtgacttcctggtgcagcagctggaccccagcaatgccatcggcatcgccaacttcgctgagcagattggctgtgtggagttgcaccagcgtgcccgggagtacatctacatgcattttggggaggtggccaagcaagaggagttcttcaacctgtcccactgccaactggtgaccctcatcagccgggacgacctgaacgtgcgctgcgagtccgaggtcttccacgcctgcatcaactgggtcaagtacgactgcgaacagcgacggttctacgtccaggcgctgctgcgggccgtgcgctgccactcgttgacgccgaacttcctgcagatgcagctgcagaagtgcgagatcctgcagtccgactcccgctgcaaggactacctggtcaagatcttcgaggagctcaccctgcacaagcccacgcaggtgatgccctgccgggcgcccggcagcggcagcggcagcgaagtgaaactggtggaaagcggcggcgatctggtgaaaccgggcggcagcctgaaactgagctgcgcggcgagcggctttacctttagccattatggcatgagctgggtgcgccagaccccggataaacgcctggaatgggtggcgaccattggcagccgcggcacctatacccattatccggatagcgtgaaaggccgctttaccattagccgcgataacgataaaaacgcgctgtatctgcagatgaacagcctgcgcaccgaagataccgcgatgtattattgcgcgcgcaaaagcgaattttattattatggcaacacctattattatagcgcgatggattattggggccagggcgcgagcgtgaccgtgagcagcggcggcggcggcagcggcggcggcgatagcggcggcggcggcagcgatattgtgctgacccagagcccggcgagcctggcggtgagcctgggccagcgcgcgaccattagctgccgcgcgagcgaaagcgtggataactatggctttagctttatgaactggtttcagcagaaaccgggccagccgccgaaactgctgatttatgcgaccagcaaccgcggcagcggcgtgccggcgcgctttagcggcagcggcagcggcaccgattttagcctgaacattcatccggtggaagaagatgatagcgcgatgtatttttgccagcagaccaaagaagtgccgtggacctttggcggcggcaccaaactggaaattaaacgctaa

SEQ ID NO: 1239 - DNA, 1797 bp, synthetic construct
  source 1..1797: mol_type = other DNA; note = NLS-Keap1-(GS)4-3DX.1 nucleic acid
ccggcggcgaaacgcgtgaaactggatggcagcggcagcggcagccagccagatcccaggcctagcggggctggggcctgctgccgattcctgcccctgcagtcacagtgccctgagggggcaggggacgcggtgatgtacgcctccactgagtgcaaggcggaggtgacgccctcccagcatggcaaccgcaccttcagctacaccctggaggatcataccaagcaggcctttggcatcatgaacgagctgcggctcagccagcagctgtgtgacgtcacactgcaggtcaagtaccaggatgcaccggccgcccagttcatggcccacaaggtggtgctggcctcatccagccctgtcttcaaggccatgttcaccaacgggctgcgggagcagggcatggaggtggtgtccattgagggtatccaccccaaggtcatggagcgcctcattgaattcgcctacacggcctccatctccatgggcgagaagtgtgtcctccacgtcatgaacggtgctgtcatgtaccagatcgacagcgttgtccgtgcctgcagtgacttcctggtgcagcagctggaccccagcaatgccatcggcatcgccaacttcgctgagcagattggctgtgtggagttgcaccagcgtgcccgggagtacatctacatgcattttggggaggtggccaagcaagaggagttcttcaacctgtcccactgccaactggtgaccctcatcagccgggacgacctgaacgtgcgctgcgagtccgaggtcttccacgcctgcatcaactgggtcaagtacgactgcgaacagcgacggttctacgtccaggcgctgctgcgggccgtgcgctgccactcgttgacgccgaacttcctgcagatgcagctgcagaagtgcgagatcctgcagtccgactcccgctgcaaggactacctggtcaagatcttcgaggagctcaccctgcacaagcccacgcaggtgatgccctgccgggcgcccggcagcggcagcggcagcggcagcgaagtgaaactggtggaaagcggcggcgatctggtgaaaccgggcggcagcctgaaactgagctgcgcggcgagcggctttacctttagccattatggcatgagctgggtgcgccagaccccggataaacgcctggaatgggtggcgaccattggcagccgcggcacctatacccattatccggatagcgtgaaaggccgctttaccattagccgcgataacgataaaaacgcgctgtatctgcagatgaacagcctgcgcaccgaagataccgcgatgtattattgcgcgcgcaaaagcgaattttattattatggcaacacctattattatagcgcgatggattattggggccagggcgcgagcgtgaccgtgagcagcggcggcggcggcagcggcggcggcgatagcggcggcggcggcagcgatattgtgctgacccagagcccggcgagcctggcggtgagcctgggccagcgcgcgaccattagctgccgcgcgagcgaaagcgtggataactatggctttagctttatgaactggtttcagcagaaaccgggccagccgccgaaactgctgatttatgcgaccagcaaccgcggcagcggcgtgccggcgcgctttagcggcagcggcagcggcaccgattttagcctgaacattcatccggtggaagaagatgatagcgcgatgtatttttgccagcagaccaaagaagtgccgtggacctttggcggcggcaccaaactggaaattaaacgctaa

SEQ ID NO: 1240 - DNA, 1803 bp, synthetic construct
  source 1..1803: mol_type = other DNA; note = NLS-Keap1-(GS)5-3DX.1 nucleic acid
ccggcggcgaaacgcgtgaaactggatggcagcggcagcggcagccagccagatcccaggcctagcggggctggggcctgctgccgattcctgcccctgcagtcacagtgccctgagggggcaggggacgcggtgatgtacgcctccactgagtgcaaggcggaggtgacgccctcccagcatggcaaccgcaccttcagctacaccctggaggatcataccaagcaggcctttggcatcatgaacgagctgcggctcagccagcagctgtgtgacgtcacactgcaggtcaagtaccaggatgcaccggccgcccagttcatggcccacaaggtggtgctggcctcatccagccctgtcttcaaggccatgttcaccaacgggctgcgggagcagggcatggaggtggtgtccattgagggtatccaccccaaggtcatggagcgcctcattgaattcgcctacacggcctccatctccatgggcgagaagtgtgtcctccacgtcatgaacggtgctgtcatgtaccagatcgacagcgttgtccgtgcctgcagtgacttcctggtgcagcagctggaccccagcaatgccatcggcatcgccaacttcgctgagcagattggctgtgtggagttgcaccagcgtgcccgggagtacatctacatgcattttggggaggtggccaagcaagaggagttcttcaacctgtcccactgccaactggtgaccctcatcagccgggacgacctgaacgtgcgctgcgagtccgaggtcttccacgcctgcatcaactgggtcaagtacgactgcgaacagcgacggttctacgtccaggcgctgctgcgggccgtgcgctgccactcgttgacgccgaacttcctgcagatgcagctgcagaagtgcgagatcctgcagtccgactcccgctgcaaggactacctggtcaagatcttcgaggagctcaccctgcacaagcccacgcaggtgatgccctgccgggcgcccggcagcggcagcggcagcggcagcggcagcgaagtgaaactggtggaaagcggcggcgatctggtgaaaccgggcggcagcctgaaactgagctgcgcggcgagcggctttacctttagccattatggcatgagctgggtgcgccagaccccggataaacgcctggaatgggtggcgaccattggcagccgcggcacctatacccattatccggatagcgtgaaaggccgctttaccattagccgcgataacgataaaaacgcgctgtatctgcagatgaacagcctgcgcaccgaagataccgcgatgtattattgcgcgcgcaaaagcgaattttattattatggcaacacctattattatagcgcgatggattattggggccagggcgcgagcgtgaccgtgagcagcggcggcggcggcagcggcggcggcgatagcggcggcggcggcagcgatattgtgctgacccagagcccggcgagcctggcggtgagcctgggccagcgcgcgaccattagctgccgcgcgagcgaaagcgtggataactatggctttagctttatgaactggtttcagcagaaaccgggccagccgccgaaactgctgatttatgcgaccagcaaccgcggcagcggcgtgccggcgcgctttagcggcagcggcagcggcaccgattttagcctgaacattcatccggtggaagaagatgatagcgcgatgtatttttgccagcagaccaaagaagtgccgtggacctttggcggcggcaccaaactggaaattaaacgctaa

SEQ ID NO: 1241 - DNA, 1809 bp, synthetic construct
  source 1..1809: mol_type = other DNA; note = NLS-Keap1-(GS)6-3DX.1 nucleic acid
ccggcggcgaaacgcgtgaaactggatggcagcggcagcggcagccagccagatcccaggcctagcggggctggggcctgctgccgattcctgcccctgcagtcacagtgccctgagggggcaggggacgcggtgatgtacgcctccactgagtgcaaggcggaggtgacgccctcccagcatggcaaccgcaccttcagctacaccctggaggatcataccaagcaggcctttggcatcatgaacgagctgcggctcagccagcagctgtgtgacgtcacactgcaggtcaagtaccaggatgcaccggccgcccagttcatggcccacaaggtggtgctggcctcatccagccctgtcttcaaggccatgttcaccaacgggctgcgggagcagggcatggaggtggtgtccattgagggtatccaccccaaggtcatggagcgcctcattgaattcgcctacacggcctccatctccatgggcgagaagtgtgtcctccacgtcatgaacggtgctgtcatgtaccagatcgacagcgttgtccgtgcctgcagtgacttcctggtgcagcagctggaccccagcaatgccatcggcatcgccaacttcgctgagcagattggctgtgtggagttgcaccagcgtgcccgggagtacatctacatgcattttggggaggtggccaagcaagaggagttcttcaacctgtcccactgccaactggtgaccctcatcagccgggacgacctgaacgtgcgctgcgagtccgaggtcttccacgcctgcatcaactgggtcaagtacgactgcgaacagcgacggttctacgtccaggcgctgctgcgggccgtgcgctgccactcgttgacgccgaacttcctgcagatgcagctgcagaagtgcgagatcctgcagtccgactcccgctgcaaggactacctggtcaagatcttcgaggagctcaccctgcacaagcccacgcaggtgatgccctgccgggcgcccggcagcggcagcggcagcggcagcggcagcggcagcgaagtgaaactggtggaaagcggcggcgatctggtgaaaccgggcggcagcctgaaactgagctgcgcggcgagcggctttacctttagccattatggcatgagctgggtgcgccagaccccggataaacgcctggaatgggtggcgaccattggcagccgcggcacctatacccattatccggatagcgtgaaaggccgctttaccattagccgcgataacgataaaaacgcgctgtatctgcagatgaacagcctgcgcaccgaagataccgcgatgtattattgcgcgcgcaaaagcgaattttattattatggcaacacctattattatagcgcgatggattattggggccagggcgcgagcgtgaccgtgagcagcggcggcggcggcagcggcggcggcgatagcggcggcggcggcagcgatattgtgctgacccagagcccggcgagcctggcggtgagcctgggccagcgcgcgaccattagctgccgcgcgagcgaaagcgtggataactatggctttagctttatgaactggtttcagcagaaaccgggccagccgccgaaactgctgatttatgcgaccagcaaccgcggcagcggcgtgccggcgcgctttagcggcagcggcagcggcaccgattttagcctgaacattcatccggtggaagaagatgatagcgcgatgtatttttgccagcagaccaaagaagtgccgtggacctttggcggcggcaccaaactggaaattaaacgctaa

SEQ ID NO: 1242 - DNA, 1809 bp, synthetic construct
  source 1..1809: mol_type = other DNA; note = HA-NLS-Keap1-(GS)1-3DX.1 nucleic acid
atgtacccatacgatgttccagattacgctccggcggcgaaacgcgtgaaactggatggcagcggcagcggcagccagccagatcccaggcctagcggggctggggcctgctgccgattcctgcccctgcagtcacagtgccctgagggggcaggggacgcggtgatgtacgcctccactgagtgcaaggcggaggtgacgccctcccagcatggcaaccgcaccttcagctacaccctggaggatcataccaagcaggcctttggcatcatgaacgagctgcggctcagccagcagctgtgtgacgtcacactgcaggtcaagtaccaggatgcaccggccgcccagttcatggcccacaaggtggtgctggcctcatccagccctgtcttcaaggccatgttcaccaacgggctgcgggagcagggcatggaggtggtgtccattgagggtatccaccccaaggtcatggagcgcctcattgaattcgcctacacggcctccatctccatgggcgagaagtgtgtcctccacgtcatgaacggtgctgtcatgtaccagatcgacagcgttgtccgtgcctgcagtgacttcctggtgcagcagctggaccccagcaatgccatcggcatcgccaacttcgctgagcagattggctgtgtggagttgcaccagcgtgcccgggagtacatctacatgcattttggggaggtggccaagcaagaggagttcttcaacctgtcccactgccaactggtgaccctcatcagccgggacgacctgaacgtgcgctgcgagtccgaggtcttccacgcctgcatcaactgggtcaagtacgactgcgaacagcgacggttctacgtccaggcgctgctgcgggccgtgcgctgccactcgttgacgccgaacttcctgcagatgcagctgcagaagtgcgagatcctgcagtccgactcccgctgcaaggactacctggtcaagatcttcgaggagctcaccctgcacaagcccacgcaggtgatgccctgccgggcgcccggcagcgaagtgaaactggtggaaagcggcggcgatctggtgaaaccgggcggcagcctgaaactgagctgcgcggcgagcggctttacctttagccattatggcatgagctgggtgcgccagaccccggataaacgcctggaatgggtggcgaccattggcagccgcggcacctatacccattatccggatagcgtgaaaggccgctttaccattagccgcgataacgataaaaacgcgctgtatctgcagatgaacagcctgcgcaccgaagataccgcgatgtattattgcgcgcgcaaaagcgaattttattattatggcaacacctattattatagcgcgatggattattggggccagggcgcgagcgtgaccgtgagcagcggcggcggcggcagcggcggcggcgatagcggcggcggcggcagcgatattgtgctgacccagagcccggcgagcctggcggtgagcctgggccagcgcgcgaccattagctgccgcgcgagcgaaagcgtggataactatggctttagctttatgaactggtttcagcagaaaccgggccagccgccgaaactgctgatttatgcgaccagcaaccgcggcagcggcgtgccggcgcgctttagcggcagcggcagcggcaccgattttagcctgaacattcatccggtggaagaagatgatagcgcgatgtatttttgccagcagaccaaagaagtgccgtggacctttggcggcggcaccaaactggaaattaaacgctaa

SEQ ID NO: 1243 - DNA, 1815 bp, synthetic construct
  source 1..1815: mol_type = other DNA; note = HA-NLS-Keap1-(GS)2-3DX.1 nucleic acid
atgtacccatacgatgttccagattacgctccggcggcgaaacgcgtgaaactggatggcagcggcagcggcagccagccagatcccaggcctagcggggctggggcctgctgccgattcctgcccctgcagtcacagtgccctgagggggcaggggacgcggtgatgtacgcctccactgagtgcaaggcggaggtgacgccctcccagcatggcaaccgcaccttcagctacaccctggaggatcataccaagcaggcctttggcatcatgaacgagctgcggctcagccagcagctgtgtgacgtcacactgcaggtcaagtaccaggatgcaccggccgcccagttcatggcccacaaggtggtgctggcctcatccagccctgtcttcaaggccatgttcaccaacgggctgcgggagcagggcatggaggtggtgtccattgagggtatccaccccaaggtcatggagcgcctcattgaattcgcctacacggcctccatctccatgggcgagaagtgtgtcctccacgtcatgaacggtgctgtcatgtaccagatcgacagcgttgtccgtgcctgcagtgacttcctggtgcagcagctggaccccagcaatgccatcggcatcgccaacttcgctgagcagattggctgtgtggagttgcaccagcgtgcccgggagtacatctacatgcattttggggaggtggccaagcaagaggagttcttcaacctgtcccactgccaactggtgaccctcatcagccgggacgacctgaacgtgcgctgcgagtccgaggtcttccacgcctgcatcaactgggtcaagtacgactgcgaacagcgacggttctacgtccaggcgctgctgcgggccgtgcgctgccactcgttgacgccgaacttcctgcagatgcagctgcagaagtgcgagatcctgcagtccgactcccgctgcaaggactacctggtcaagatcttcgaggagctcaccctgcacaagcccacgcaggtgatgccctgccgggcgcccggcagcggcagcgaagtgaaactggtggaaagcggcggcgatctggtgaaaccgggcggcagcctgaaactgagctgcgcggcgagcggctttacctttagccattatggcatgagctgggtgcgccagaccccggataaacgcctggaatgggtggcgaccattggcagccgcggcacctatacccattatccggatagcgtgaaaggccgctttaccattagccgcgataacgataaaaacgcgctgtatctgcagatgaacagcctgcgcaccgaagataccgcgatgtattattgcgcgcgcaaaagcgaattttattattatggcaacacctattattatagcgcgatggattattggggccagggcgcgagcgtgaccgtgagcagcggcggcggcggcagcggcggcggcgatagcggcggcggcggcagcgatattgtgctgacccagagcccggcgagcctggcggtgagcctgggccagcgcgcgaccattagctgccgcgcgagcgaaagcgtggataactatggctttagctttatgaactggtttcagcagaaaccgggccagccgccgaaactgctgatttatgcgaccagcaaccgcggcagcggcgtgccggcgcgctttagcggcagcggcagcggcaccgattttagcctgaacattcatccggtggaagaagatgatagcgcgatgtatttttgccagcagaccaaagaagtgccgtggacctttggcggcggcaccaaactggaaattaaacgctaa

SEQ ID NO: 1244 - DNA, 1821 bp, synthetic construct
  source 1..1821: mol_type = other DNA; note = HA-NLS-Keap1-(GS)3-3DX.1 nucleic acid
atgtacccatacgatgttccagattacgctccggcggcgaaacgcgtgaaactggatggcagcggcagcggcagccagccagatcccaggcctagcggggctggggcctgctgccgattcctgcccctgcagtcacagtgccctgagggggcaggggacgcggtgatgtacgcctccactgagtgcaaggcggaggtgacgccctcccagcatggcaaccgcaccttcagctacaccctggaggatcataccaagcaggcctttggcatcatgaacgagctgcggctcagccagcagctgtgtgacgtcacactgcaggtcaagtaccaggatgcaccggccgcccagttcatggcccacaaggtggtgctggcctcatccagccctgtcttcaaggccatgttcaccaacgggctgcgggagcagggcatggaggtggtgtccattgagggtatccaccccaaggtcatggagcgcctcattgaattcgcctacacggcctccatctccatgggcgagaagtgtgtcctccacgtcatgaacggtgctgtcatgtaccagatcgacagcgttgtccgtgcctgcagtgacttcctggtgcagcagctggaccccagcaatgccatcggcatcgccaacttcgctgagcagattggctgtgtggagttgcaccagcgtgcccgggagtacatctacatgcattttggggaggtggccaagcaagaggagttcttcaacctgtcccactgccaactggtgaccctcatcagccgggacgacctgaacgtgcgctgcgagtccgaggtcttccacgcctgcatcaactgggtcaagtacgactgcgaacagcgacggttctacgtccaggcgctgctgcgggccgtgcgctgccactcgttgacgccgaacttcctgcagatgcagctgcagaagtgcgagatcctgcagtccgactcccgctgcaaggactacctggtcaagatcttcgaggagctcaccctgcacaagcccacgcaggtgatgccctgccgggcgcccggcagcggcagcggcagcgaagtgaaactggtggaaagcggcggcgatctggtgaaaccgggcggcagcctgaaactgagctgcgcggcgagcggctttacctttagccattatggcatgagctgggtgcgccagaccccggataaacgcctggaatgggtggcgaccattggcagccgcggcacctatacccattatccggatagcgtgaaaggccgctttaccattagccgcgataacgataaaaacgcgctgtatctgcagatgaacagcctgcgcaccgaagataccgcgatgtattattgcgcgcgcaaaagcgaattttattattatggcaacacctattattatagcgcgatggattattggggccagggcgcgagcgtgaccgtgagcagcggcggcggcggcagcggcggcggcgatagcggcggcggcggcagcgatattgtgctgacccagagcccggcgagcctggcggtgagcctgggccagcgcgcgaccattagctgccgcgcgagcgaaagcgtggataactatggctttagctttatgaactggtttcagcagaaaccgggccagccgccgaaactgctgatttatgcgaccagcaaccgcggcagcggcgtgccggcgcgctttagcggcagcggcagcggcaccgattttagcctgaacattcatccggtggaagaagatgatagcgcgatgtatttttgccagcagaccaaagaagtgccgtggacctttggcggcggcaccaaactggaaattaaacgctaa

SEQ ID NO: 1245 - DNA, 1827 bp, synthetic construct
  source 1..1827: mol_type = other DNA; note = HA-NLS-Keap1-(GS)4-3DX.1 nucleic acid
atgtacccatacgatgttccagattacgctccggcggcgaaacgcgtgaaactggatggcagcggcagcggcagccagccagatcccaggcctagcggggctggggcctgctgccgattcctgcccctgcagtcacagtgccctgagggggcaggggacgcggtgatgtacgcctccactgagtgcaaggcggaggtgacgccctcccagcatggcaaccgcaccttcagctacaccctggaggatcataccaagcaggcctttggcatcatgaacgagctgcggctcagccagcagctgtgtgacgtcacactgcaggtcaagtaccaggatgcaccggccgcccagttcatggcccacaaggtggtgctggcctcatccagccctgtcttcaaggccatgttcaccaacgggctgcgggagcagggcatggaggtggtgtccattgagggtatccaccccaaggtcatggagcgcctcattgaattcgcctacacggcctccatctccatgggcgagaagtgtgtcctccacgtcatgaacggtgctgtcatgtaccagatcgacagcgttgtccgtgcctgcagtgacttcctggtgcagcagctggaccccagcaatgccatcggcatcgccaacttcgctgagcagattggctgtgtggagttgcaccagcgtgcccgggagtacatctacatgcattttggggaggtggccaagcaagaggagttcttcaacctgtcccactgccaactggtgaccctcatcagccgggacgacctgaacgtgcgctgcgagtccgaggtcttccacgcctgcatcaactgggtcaagtacgactgcgaacagcgacggttctacgtccaggcgctgctgcgggccgtgcgctgccactcgttgacgccgaacttcctgcagatgcagctgcagaagtgcgagatcctgcagtccgactcccgctgcaaggactacctggtcaagatcttcgaggagctcaccctgcacaagcccacgcaggtgatgccctgccgggcgcccggcagcggcagcggcagcggcagcgaagtgaaactggtggaaagcggcggcgatctggtgaaaccgggcggcagcctgaaactgagctgcgcggcgagcggctttacctttagccattatggcatgagctgggtgcgccagaccccggataaacgcctggaatgggtggcgaccattggcagccgcggcacctatacccattatccggatagcgtgaaaggccgctttaccattagccgcgataacgataaaaacgcgctgtatctgcagatgaacagcctgcgcaccgaagataccgcgatgtattattgcgcgcgcaaaagcgaattttattattatggcaacacctattattatagcgcgatggattattggggccagggcgcgagcgtgaccgtgagcagcggcggcggcggcagcggcggcggcgatagcggcggcggcggcagcgatattgtgctgacccagagcccggcgagcctggcggtgagcctgggccagcgcgcgaccattagctgccgcgcgagcgaaagcgtggataactatggctttagctttatgaactggtttcagcagaaaccgggccagccgccgaaactgctgatttatgcgaccagcaaccgcggcagcggcgtgccggcgcgctttagcggcagcggcagcggcaccgattttagcctgaacattcatccggtggaagaagatgatagcgcgatgtatttttgccagcagaccaaagaagtgccgtggacctttggcggcggcaccaaactggaaattaaacgctaa

SEQ ID NO: 1246 - DNA, 1833 bp, synthetic construct
  source 1..1833: mol_type = other DNA; note = HA-NLS-Keap1-(GS)5-3DX.1 nucleic acid
atgtacccatacgatgttccagattacgctccggcggcgaaacgcgtgaaactggatggcagcggcagcggcagccagccagatcccaggcctagcggggctggggcctgctgccgattcctgcccctgcagtcacagtgccctgagggggcaggggacgcggtgatgtacgcctccactgagtgcaaggcggaggtgacgccctcccagcatggcaaccgcaccttcagctacaccctggaggatcataccaagcaggcctttggcatcatgaacgagctgcggctcagccagcagctgtgtgacgtcacactgcaggtcaagtaccaggatgcaccggccgcccagttcatggcccacaaggtggtgctggcctcatccagccctgtcttcaaggccatgttcaccaacgggctgcgggagcagggcatggaggtggtgtccattgagggtatccaccccaaggtcatggagcgcctcattgaattcgcctacacggcctccatctccatgggcgagaagtgtgtcctccacgtcatgaacggtgctgtcatgtaccagatcgacagcgttgtccgtgcctgcagtgacttcctggtgcagcagctggaccccagcaatgccatcggcatcgccaacttcgctgagcagattggctgtgtggagttgcaccagcgtgcccgggagtacatctacatgcattttggggaggtggccaagcaagaggagttcttcaacctgtcccactgccaactggtgaccctcatcagccgggacgacctgaacgtgcgctgcgagtccgaggtcttccacgcctgcatcaactgggtcaagtacgactgcgaacagcgacggttctacgtccaggcgctgctgcgggccgtgcgctgccactcgttgacgccgaacttcctgcagatgcagctgcagaagtgcgagatcctgcagtccgactcccgctgcaaggactacctggtcaagatcttcgaggagctcaccctgcacaagcccacgcaggtgatgccctgccgggcgcccggcagcggcagcggcagcggcagcggcagcgaagtgaaactggtggaaagcggcggcgatctggtgaaaccgggcggcagcctgaaactgagctgcgcggcgagcggctttacctttagccattatggcatgagctgggtgcgccagaccccggataaacgcctggaatgggtggcgaccattggcagccgcggcacctatacccattatccggatagcgtgaaaggccgctttaccattagccgcgataacgataaaaacgcgctgtatctgcagatgaacagcctgcgcaccgaagataccgcgatgtattattgcgcgcgcaaaagcgaattttattattatggcaacacctattattatagcgcgatggattattggggccagggcgcgagcgtgaccgtgagcagcggcggcggcggcagcggcggcggcgatagcggcggcggcggcagcgatattgtgctgacccagagcccggcgagcctggcggtgagcctgggccagcgcgcgaccattagctgccgcgcgagcgaaagcgtggataactatggctttagctttatgaactggtttcagcagaaaccgggccagccgccgaaactgctgatttatgcgaccagcaaccgcggcagcggcgtgccggcgcgctttagcggcagcggcagcggcaccgattttagcctgaacattcatccggtggaagaagatgatagcgcgatgtatttttgccagcagaccaaagaagtgccgtggacctttggcggcggcaccaaactggaaattaaacgctaa

SEQ ID NO: 1247 - DNA, 1839 bp, synthetic construct
  source 1..1839: mol_type = other DNA; note = HA-NLS-Keap1-(GS)6-3DX.1 nucleic acid
atgtacccatacgatgttccagattacgctccggcggcgaaacgcgtgaaactggatggcagcggcagcggcagccagccagatcccaggcctagcggggctggggcctgctgccgattcctgcccctgcagtcacagtgccctgagggggcaggggacgcggtgatgtacgcctccactgagtgcaaggcggaggtgacgccctcccagcatggcaaccgcaccttcagctacaccctggaggatcataccaagcaggcctttggcatcatgaacgagctgcggctcagccagcagctgtgtgacgtcacactgcaggtcaagtaccaggatgcaccggccgcccagttcatggcccacaaggtggtgctggcctcatccagccctgtcttcaaggccatgttcaccaacgggctgcgggagcagggcatggaggtggtgtccattgagggtatccaccccaaggtcatggagcgcctcattgaattcgcctacacggcctccatctccatgggcgagaagtgtgtcctccacgtcatgaacggtgctgtcatgtaccagatcgacagcgttgtccgtgcctgcagtgacttcctggtgcagcagctggaccccagcaatgccatcggcatcgccaacttcgctgagcagattggctgtgtggagttgcaccagcgtgcccgggagtacatctacatgcattttggggaggtggccaagcaagaggagttcttcaacctgtcccactgccaactggtgaccctcatcagccgggacgacctgaacgtgcgctgcgagtccgaggtcttccacgcctgcatcaactgggtcaagtacgactgcgaacagcgacggttctacgtccaggcgctgctgcgggccgtgcgctgccactcgttgacgccgaacttcctgcagatgcagctgcagaagtgcgagatcctgcagtccgactcccgctgcaaggactacctggtcaagatcttcgaggagctcaccctgcacaagcccacgcaggtgatgccctgccgggcgcccggcagcggcagcggcagcggcagcggcagcggcagcgaagtgaaactggtggaaagcggcggcgatctggtgaaaccgggcggcagcctgaaactgagctgcgcggcgagcggctttacctttagccattatggcatgagctgggtgcgccagaccccggataaacgcctggaatgggtggcgaccattggcagccgcggcacctatacccattatccggatagcgtgaaaggccgctttaccattagccgcgataacgataaaaacgcgctgtatctgcagatgaacagcctgcgcaccgaagataccgcgatgtattattgcgcgcgcaaaagcgaattttattattatggcaacacctattattatagcgcgatggattattggggccagggcgcgagcgtgaccgtgagcagcggcggcggcggcagcggcggcggcgatagcggcggcggcggcagcgatattgtgctgacccagagcccggcgagcctggcggtgagcctgggccagcgcgcgaccattagctgccgcgcgagcgaaagcgtggataactatggctttagctttatgaactggtttcagcagaaaccgggccagccgccgaaactgctgatttatgcgaccagcaaccgcggcagcggcgtgccggcgcgctttagcggcagcggcagcggcaccgattttagcctgaacattcatccggtggaagaagatgatagcgcgatgtatttttgccagcagaccaaagaagtgccgtggacctttggcggcggcaccaaactggaaattaaacgctaa

SEQ ID NO: 1248 - DNA, 1197 bp, synthetic construct
  source 1..1197: mol_type = other DNA; note = NLS-RNF125-(GS)1-3DX.1 nucleic acid
ccggcggcgaaacgcgtgaaactggatggcagcggcagcggcagcggctccgtgctgagcaccgacagcggcaaatcggcgcccgcctctgccaccgcgcgggccctggagcgcaggagggacccggagttgcccgtcacgtccttcgactgcgccgtgtgccttgaggtgttacaccagcctgtccggacccgctgcggccacgtattctgccgttcctgtattgctaccagtctgaagaacaacaagtggacctgtccttattgccgggcatatcttccttcagaaggagttccagcaactgatgtagccaaaagaatgaaatcagagtataagaactgcgctgagtgtgacaccctggtttgcctcagtgaaatgagggcacatattcggacttgtcagaagtacatagataagtatggaccaggcagcgaagtgaaactggtggaaagcggcggcgatctggtgaaaccgggcggcagcctgaaactgagctgcgcggcgagcggctttacctttagccattatggcatgagctgggtgcgccagaccccggataaacgcctggaatgggtggcgaccattggcagccgcggcacctatacccattatccggatagcgtgaaaggccgctttaccattagccgcgataacgataaaaacgcgctgtatctgcagatgaacagcctgcgcaccgaagataccgcgatgtattattgcgcgcgcaaaagcgaattttattattatggcaacacctattattatagcgcgatggattattggggccagggcgcgagcgtgaccgtgagcagcggcggcggcggcagcggcggcggcgatagcggcggcggcggcagcgatattgtgctgacccagagcccggcgagcctggcggtgagcctgggccagcgcgcgaccattagctgccgcgcgagcgaaagcgtggataactatggctttagctttatgaactggtttcagcagaaaccgggccagccgccgaaactgctgatttatgcgaccagcaaccgcggcagcggcgtgccggcgcgctttagcggcagcggcagcggcaccgattttagcctgaacattcatccggtggaagaagatgatagcgcgatgtatttttgccagcagaccaaagaagtgccgtggacctttggcggcggcaccaaactggaaattaaacgctaa

SEQ ID NO: 1249 - DNA, 1203 bp, synthetic construct
  source 1..1203: mol_type = other DNA; note = NLS-RNF125-(GS)2-3DX.1 nucleic acid
ccggcggcgaaacgcgtgaaactggatggcagcggcagcggcagcggctccgtgctgagcaccgacagcggcaaatcggcgcccgcctctgccaccgcgcgggccctggagcgcaggagggacccggagttgcccgtcacgtccttcgactgcgccgtgtgccttgaggtgttacaccagcctgtccggacccgctgcggccacgtattctgccgttcctgtattgctaccagtctgaagaacaacaagtggacctgtccttattgccgggcatatcttccttcagaaggagttccagcaactgatgtagccaaaagaatgaaatcagagtataagaactgcgctgagtgtgacaccctggtttgcctcagtgaaatgagggcacatattcggacttgtcagaagtacatagataagtatggaccaggcagcggcagcgaagtgaaactggtggaaagcggcggcgatctggtgaaaccgggcggcagcctgaaactgagctgcgcggcgagcggctttacctttagccattatggcatgagctgggtgcgccagaccccggataaacgcctggaatgggtggcgaccattggcagccgcggcacctatacccattatccggatagcgtgaaaggccgctttaccattagccgcgataacgataaaaacgcgctgtatctgcagatgaacagcctgcgcaccgaagataccgcgatgtattattgcgcgcgcaaaagcgaattttattattatggcaacacctattattatagcgcgatggattattggggccagggcgcgagcgtgaccgtgagcagcggcggcggcggcagcggcggcggcgatagcggcggcggcggcagcgatattgtgctgacccagagcccggcgagcctggcggtgagcctgggccagcgcgcgaccattagctgccgcgcgagcgaaagcgtggataactatggctttagctttatgaactggtttcagcagaaaccgggccagccgccgaaactgctgatttatgcgaccagcaaccgcggcagcggcgtgccggcgcgctttagcggcagcggcagcggcaccgattttagcctgaacattcatccggtggaagaagatgatagcgcgatgtatttttgccagcagaccaaagaagtgccgtggacctttggcggcggcaccaaactggaaattaaacgctaa

SEQ ID NO: 1250 - DNA, 1209 bp, synthetic construct
  source 1..1209: mol_type = other DNA; note = NLS-RNF125-(GS)3-3DX.1 nucleic acid
ccggcggcgaaacgcgtgaaactggatggcagcggcagcggcagcggctccgtgctgagcaccgacagcggcaaatcggcgcccgcctctgccaccgcgcgggccctggagcgcaggagggacccggagttgcccgtcacgtccttcgactgcgccgtgtgccttgaggtgttacaccagcctgtccggacccgctgcggccacgtattctgccgttcctgtattgctaccagtctgaagaacaacaagtggacctgtccttattgccgggcatatcttccttcagaaggagttccagcaactgatgtagccaaaagaatgaaatcagagtataagaactgcgctgagtgtgacaccctggtttgcctcagtgaaatgagggcacatattcggacttgtcagaagtacatagataagtatggaccaggcagcggcagcggcagcgaagtgaaactggtggaaagcggcggcgatctggtgaaaccgggcggcagcctgaaactgagctgcgcggcgagcggctttacctttagccattatggcatgagctgggtgcgccagaccccggataaacgcctggaatgggtggcgaccattggcagccgcggcacctatacccattatccggatagcgtgaaaggccgctttaccattagccgcgataacgataaaaacgcgctgtatctgcagatgaacagcctgcgcaccgaagataccgcgatgtattattgcgcgcgcaaaagcgaattttattattatggcaacacctattattatagcgcgatggattattggggccagggcgcgagcgtgaccgtgagcagcggcggcggcggcagcggcggcggcgatagcggcggcggcggcagcgatattgtgctgacccagagcccggcgagcctggcggtgagcctgggccagcgcgcgaccattagctgccgcgcgagcgaaagcgtggataactatggctttagctttatgaactggtttcagcagaaaccgggccagccgccgaaactgctgatttatgcgaccagcaaccgcggcagcggcgtgccggcgcgctttagcggcagcggcagcggcaccgattttagcctgaacattcatccggtggaagaagatgatagcgcgatgtatttttgccagcagaccaaagaagtgccgtggacctttggcggcggcaccaaactggaaattaaacgctaa

SEQ ID NO: 1251 - DNA, 1215 bp, synthetic construct
  source 1..1215: mol_type = other DNA; note = NLS-RNF125-(GS)4-3DX.1 nucleic acid
ccggcggcgaaacgcgtgaaactggatggcagcggcagcggcagcggctccgtgctgagcaccgacagcggcaaatcggcgcccgcctctgccaccgcgcgggccctggagcgcaggagggacccggagttgcccgtcacgtccttcgactgcgccgtgtgccttgaggtgttacaccagcctgtccggacccgctgcggccacgtattctgccgttcctgtattgctaccagtctgaagaacaacaagtggacctgtccttattgccgggcatatcttccttcagaaggagttccagcaactgatgtagccaaaagaatgaaatcagagtataagaactgcgctgagtgtgacaccctggtttgcctcagtgaaatgagggcacatattcggacttgtcagaagtacatagataagtatggaccaggcagcggcagcggcagcggcagcgaagtgaaactggtggaaagcggcggcgatctggtgaaaccgggcggcagcctgaaactgagctgcgcggcgagcggctttacctttagccattatggcatgagctgggtgcgccagaccccggataaacgcctggaatgggtggcgaccattggcagccgcggcacctatacccattatccggatagcgtgaaaggccgctttaccattagccgcgataacgataaaaacgcgctgtatctgcagatgaacagcctgcgcaccgaagataccgcgatgtattattgcgcgcgcaaaagcgaattttattattatggcaacacctattattatagcgcgatggattattggggccagggcgcgagcgtgaccgtgagcagcggcggcggcggcagcggcggcggcgatagcggcggcggcggcagcgatattgtgctgacccagagcccggcgagcctggcggtgagcctgggccagcgcgcgaccattagctgccgcgcgagcgaaagcgtggataactatggctttagctttatgaactggtttcagcagaaaccgggccagccgccgaaactgctgatttatgcgaccagcaaccgcggcagcggcgtgccggcgcgctttagcggcagcggcagcggcaccgattttagcctgaacattcatccggtggaagaagatgatagcgcgatgtatttttgccagcagaccaaagaagtgccgtggacctttggcggcggcaccaaactggaaattaaacgctaa

SEQ ID NO: 1252 - DNA, 1221 bp, synthetic construct
  source 1..1221: mol_type = other DNA; note = NLS-RNF125-(GS)5-3DX.1 nucleic acid
ccggcggcgaaacgcgtgaaactggatggcagcggcagcggcagcggctccgtgctgagcaccgacagcggcaaatcggcgcccgcctctgccaccgcgcgggccctggagcgcaggagggacccggagttgcccgtcacgtccttcgactgcgccgtgtgccttgaggtgttacaccagcctgtccggacccgctgcggccacgtattctgccgttcctgtattgctaccagtctgaagaacaacaagtggacctgtccttattgccgggcatatcttccttcagaaggagttccagcaactgatgtagccaaaagaatgaaatcagagtataagaactgcgctgagtgtgacaccctggtttgcctcagtgaaatgagggcacatattcggacttgtcagaagtacatagataagtatggaccaggcagcggcagcggcagcggcagcggcagcgaagtgaaactggtggaaagcggcggcgatctggtgaaaccgggcggcagcctgaaactgagctgcgcggcgagcggctttacctttagccattatggcatgagctgggtgcgccagaccccggataaacgcctggaatgggtggcgaccattggcagccgcggcacctatacccattatccggatagcgtgaaaggccgctttaccattagccgcgataacgataaaaacgcgctgtatctgcagatgaacagcctgcgcaccgaagataccgcgatgtattattgcgcgcgcaaaagcgaattttattattatggcaacacctattattatagcgcgatggattattggggccagggcgcgagcgtgaccgtgagcagcggcggcggcggcagcggcggcggcgatagcggcggcggcggcagcgatattgtgctgacccagagcccggcgagcctggcggtgagcctgggccagcgcgcgaccattagctgccgcgcgagcgaaagcgtggataactatggctttagctttatgaactggtttcagcagaaaccgggccagccgccgaaactgctgatttatgcgaccagcaaccgcggcagcggcgtgccggcgcgctttagcggcagcggcagcggcaccgattttagcctgaacattcatccggtggaagaagatgatagcgcgatgtatttttgccagcagaccaaagaagtgccgtggacctttggcggcggcaccaaactggaaattaaacgctaa

SEQ ID NO: 1253 - DNA, 1227 bp, synthetic construct
  source 1..1227: mol_type = other DNA; note = NLS-RNF125-(GS)6-3DX.1 nucleic acid
ccggcggcgaaacgcgtgaaactggatggcagcggcagcggcagcggctccgtgctgagcaccgacagcggcaaatcggcgcccgcctctgccaccgcgcgggccctggagcgcaggagggacccggagttgcccgtcacgtccttcgactgcgccgtgtgccttgaggtgttacaccagcctgtccggacccgctgcggccacgtattctgccgttcctgtattgctaccagtctgaagaacaacaagtggacctgtccttattgccgggcatatcttccttcagaaggagttccagcaactgatgtagccaaaagaatgaaatcagagtataagaactgcgctgagtgtgacaccctggtttgcctcagtgaaatgagggcacatattcggacttgtcagaagtacatagataagtatggaccaggcagcggcagcggcagcggcagcggcagcggcagcgaagtgaaactggtggaaagcggcggcgatctggtgaaaccgggcggcagcctgaaactgagctgcgcggcgagcggctttacctttagccattatggcatgagctgggtgcgccagaccccggataaacgcctggaatgggtggcgaccattggcagccgcggcacctatacccattatccggatagcgtgaaaggccgctttaccattagccgcgataacgataaaaacgcgctgtatctgcagatgaacagcctgcgcaccgaagataccgcgatgtattattgcgcgcgcaaaagcgaattttattattatggcaacacctattattatagcgcgatggattattggggccagggcgcgagcgtgaccgtgagcagcggcggcggcggcagcggcggcggcgatagcggcggcggcggcagcgatattgtgctgacccagagcccggcgagcctggcggtgagcctgggccagcgcgcgaccattagctgccgcgcgagcgaaagcgtggataactatggctttagctttatgaactggtttcagcagaaaccgggccagccgccgaaactgctgatttatgcgaccagcaaccgcggcagcggcgtgccggcgcgctttagcggcagcggcagcggcaccgattttagcctgaacattcatccggtggaagaagatgatagcgcgatgtatttttgccagcagaccaaagaagtgccgtggacctttggcggcggcaccaaactggaaattaaacgctaa

SEQ ID NO: 1254 - DNA, 1227 bp, synthetic construct
  source 1..1227: mol_type = other DNA; note = HA-NLS-RNF125-(GS)1-3DX.1 nucleic acid
atgtacccatacgatgttccagattacgctccggcggcgaaacgcgtgaaactggatggcagcggcagcggcagcggctccgtgctgagcaccgacagcggcaaatcggcgcccgcctctgccaccgcgcgggccctggagcgcaggagggacccggagttgcccgtcacgtccttcgactgcgccgtgtgccttgaggtgttacaccagcctgtccggacccgctgcggccacgtattctgccgttcctgtattgctaccagtctgaagaacaacaagtggacctgtccttattgccgggcatatcttccttcagaaggagttccagcaactgatgtagccaaaagaatgaaatcagagtataagaactgcgctgagtgtgacaccctggtttgcctcagtgaaatgagggcacatattcggacttgtcagaagtacatagataagtatggaccaggcagcgaagtgaaactggtggaaagcggcggcgatctggtgaaaccgggcggcagcctgaaactgagctgcgcggcgagcggctttacctttagccattatggcatgagctgggtgcgccagaccccggataaacgcctggaatgggtggcgaccattggcagccgcggcacctatacccattatccggatagcgtgaaaggccgctttaccattagccgcgataacgataaaaacgcgctgtatctgcagatgaacagcctgcgcaccgaagataccgcgatgtattattgcgcgcgcaaaagcgaattttattattatggcaacacctattattatagcgcgatggattattggggccagggcgcgagcgtgaccgtgagcagcggcggcggcggcagcggcggcggcgatagcggcggcggcggcagcgatattgtgctgacccagagcccggcgagcctggcggtgagcctgggccagcgcgcgaccattagctgccgcgcgagcgaaagcgtggataactatggctttagctttatgaactggtttcagcagaaaccgggccagccgccgaaactgctgatttatgcgaccagcaaccgcggcagcggcgtgccggcgcgctttagcggcagcggcagcggcaccgattttagcctgaacattcatccggtggaagaagatgatagcgcgatgtatttttgccagcagaccaaagaagtgccgtggacctttggcggcggcaccaaactggaaattaaacgctaa

SEQ ID NO: 1255 - DNA, 1233 bp, synthetic construct
  source 1..1233: mol_type = other DNA; note = HA-NLS-RNF125-(GS)2-3DX.1 nucleic acid
atgtacccatacgatgttccagattacgctccggcggcgaaacgcgtgaaactggatggcagcggcagcggcagcggctccgtgctgagcaccgacagcggcaaatcggcgcccgcctctgccaccgcgcgggccctggagcgcaggagggacccggagttgcccgtcacgtccttcgactgcgccgtgtgccttgaggtgttacaccagcctgtccggacccgctgcggccacgtattctgccgttcctgtattgctaccagtctgaagaacaacaagtggacctgtccttattgccgggcatatcttccttcagaaggagttccagcaactgatgtagccaaaagaatgaaatcagagtataagaactgcgctgagtgtgacaccctggtttgcctcagtgaaatgagggcacatattcggacttgtcagaagtacatagataagtatggaccaggcagcggcagcgaagtgaaactggtggaaagcggcggcgatctggtgaaaccgggcggcagcctgaaactgagctgcgcggcgagcggctttacctttagccattatggcatgagctgggtgcgccagaccccggataaacgcctggaatgggtggcgaccattggcagccgcggcacctatacccattatccggatagcgtgaaaggccgctttaccattagccgcgataacgataaaaacgcgctgtatctgcagatgaacagcctgcgcaccgaagataccgcgatgtattattgcgcgcgcaaaagcgaattttattattatggcaacacctattattatagcgcgatggattattggggccagggcgcgagcgtgaccgtgagcagcggcggcggcggcagcggcggcggcgatagcggcggcggcggcagcgatattgtgctgacccagagcccggcgagcctggcggtgagcctgggccagcgcgcgaccattagctgccgcgcgagcgaaagcgtggataactatggctttagctttatgaactggtttcagcagaaaccgggccagccgccgaaactgctgatttatgcgaccagcaaccgcggcagcggcgtgccggcgcgctttagcggcagcggcagcggcaccgattttagcctgaacattcatccggtggaagaagatgatagcgcgatgtatttttgccagcagaccaaagaagtgccgtggacctttggcggcggcaccaaactggaaattaaacgctaa

SEQ ID NO: 1256 - DNA, 1239 bp, synthetic construct
  source 1..1239: mol_type = other DNA; note = HA-NLS-RNF125-(GS)3-3DX.1 nucleic acid
atgtacccatacgatgttccagattacgctccggcggcgaaacgcgtgaaactggatggcagcggcagcggcagcggctccgtgctgagcaccgacagcggcaaatcggcgcccgcctctgccaccgcgcgggccctggagcgcaggagggacccggagttgcccgtcacgtccttcgactgcgccgtgtgccttgaggtgttacaccagcctgtccggacccgctgcggccacgtattctgccgttcctgtattgctaccagtctgaagaacaacaagtggacctgtccttattgccgggcatatcttccttcagaaggagttccagcaactgatgtagccaaaagaatgaaatcagagtataagaactgcgctgagtgtgacaccctggtttgcctcagtgaaatgagggcacatattcggacttgtcagaagtacatagataagtatggaccaggcagcggcagcggcagcgaagtgaaactggtggaaagcggcggcgatctggtgaaaccgggcggcagcctgaaactgagctgcgcggcgagcggctttacctttagccattatggcatgagctgggtgcgccagaccccggataaacgcctggaatgggtggcgaccattggcagccgcggcacctatacccattatccggatagcgtgaaaggccgctttaccattagccgcgataacgataaaaacgcgctgtatctgcagatgaacagcctgcgcaccgaagataccgcgatgtattattgcgcgcgcaaaagcgaattttattattatggcaacacctattattatagcgcgatggattattggggccagggcgcgagcgtgaccgtgagcagcggcggcggcggcagcggcggcggcgatagcggcggcggcggcagcgatattgtgctgacccagagcccggcgagcctggcggtgagcctgggccagcgcgcgaccattagctgccgcgcgagcgaaagcgtggataactatggctttagctttatgaactggtttcagcagaaaccgggccagccgccgaaactgctgatttatgcgaccagcaaccgcggcagcggcgtgccggcgcgctttagcggcagcggcagcggcaccgattttagcctgaacattcatccggtggaagaagatgatagcgcgatgtatttttgccagcagaccaaagaagtgccgtggacctttggcggcggcaccaaactggaaattaaacgctaa

SEQ ID NO: 1257 - DNA, 1245 bp, synthetic construct
  source 1..1245: mol_type = other DNA; note = HA-NLS-RNF125-(GS)4-3DX.1 nucleic acid
atgtacccatacgatgttccagattacgctccggcggcgaaacgcgtgaaactggatggcagcggcagcggcagcggctccgtgctgagcaccgacagcggcaaatcggcgcccgcctctgccaccgcgcgggccctggagcgcaggagggacccggagttgcccgtcacgtccttcgactgcgccgtgtgccttgaggtgttacaccagcctgtccggacccgctgcggccacgtattctgccgttcctgtattgctaccagtctgaagaacaacaagtggacctgtccttattgccgggcatatcttccttcagaaggagttccagcaactgatgtagccaaaagaatgaaatcagagtataagaactgcgctgagtgtgacaccctggtttgcctcagtgaaatgagggcacatattcggacttgtcagaagtacatagataagtatggaccaggcagcggcagcggcagcggcagcgaagtgaaactggtggaaagcggcggcgatctggtgaaaccgggcggcagcctgaaactgagctgcgcggcgagcggctttacctttagccattatggcatgagctgggtgcgccagaccccggataaacgcctggaatgggtggcgaccattggcagccgcggcacctatacccattatccggatagcgtgaaaggccgctttaccattagccgcgataacgataaaaacgcgctgtatctgcagatgaacagcctgcgcaccgaagataccgcgatgtattattgcgcgcgcaaaagcgaattttattattatggcaacacctattattatagcgcgatggattattggggccagggcgcgagcgtgaccgtgagcagcggcggcggcggcagcggcggcggcgatagcggcggcggcggcagcgatattgtgctgacccagagcccggcgagcctggcggtgagcctgggccagcgcgcgaccattagctgccgcgcgagcgaaagcgtggataactatggctttagctttatgaactggtttcagcagaaaccgggccagccgccgaaactgctgatttatgcgaccagcaaccgcggcagcggcgtgccggcgcgctttagcggcagcggcagcggcaccgattttagcctgaacattcatccggtggaagaagatgatagcgcgatgtatttttgccagcagaccaaagaagtgccgtggacctttggcggcggcaccaaactggaaattaaacgctaa

SEQ ID NO: 1258 - DNA, 1251 bp, synthetic construct
  source 1..1251: mol_type = other DNA; note = HA-NLS-RNF125-(GS)5-3DX.1 nucleic acid
atgtacccatacgatgttccagattacgctccggcggcgaaacgcgtgaaactggatggcagcggcagcggcagcggctccgtgctgagcaccgacagcggcaaatcggcgcccgcctctgccaccgcgcgggccctggagcgcaggagggacccggagttgcccgtcacgtccttcgactgcgccgtgtgccttgaggtgttacaccagcctgtccggacccgctgcggccacgtattctgccgttcctgtattgctaccagtctgaagaacaacaagtggacctgtccttattgccgggcatatcttccttcagaaggagttccagcaactgatgtagccaaaagaatgaaatcagagtataagaactgcgctgagtgtgacaccctggtttgcctcagtgaaatgagggcacatattcggacttgtcagaagtacatagataagtatggaccaggcagcggcagcggcagcggcagcggcagcgaagtgaaactggtggaaagcggcggcgatctggtgaaaccgggcggcagcctgaaactgagctgcgcggcgagcggctttacctttagccattatggcatgagctgggtgcgccagaccccggataaacgcctggaatgggtggcgaccattggcagccgcggcacctatacccattatccggatagcgtgaaaggccgctttaccattagccgcgataacgataaaaacgcgctgtatctgcagatgaacagcctgcgcaccgaagataccgcgatgtattattgcgcgcgcaaaagcgaattttattattatggcaacacctattattatagcgcgatggattattggggccagggcgcgagcgtgaccgtgagcagcggcggcggcggcagcggcggcggcgatagcggcggcggcggcagcgatattgtgctgacccagagcccggcgagcctggcggtgagcctgggccagcgcgcgaccattagctgccgcgcgagcgaaagcgtggataactatggctttagctttatgaactggtttcagcagaaaccgggccagccgccgaaactgctgatttatgcgaccagcaaccgcggcagcggcgtgccggcgcgctttagcggcagcggcagcggcaccgattttagcctgaacattcatccggtggaagaagatgatagcgcgatgtatttttgccagcagaccaaagaagtgccgtggacctttggcggcggcaccaaactggaaattaaacgctaa

SEQ ID NO: 1259 - DNA, 1257 bp, synthetic construct
  source 1..1257: mol_type = other DNA; note = HA-NLS-RNF125-(GS)6-3DX.1 nucleic acid
atgtacccatacgatgttccagattacgctccggcggcgaaacgcgtgaaactggatggcagcggcagcggcagcggctccgtgctgagcaccgacagcggcaaatcggcgcccgcctctgccaccgcgcgggccctggagcgcaggagggacccggagttgcccgtcacgtccttcgactgcgccgtgtgccttgaggtgttacaccagcctgtccggacccgctgcggccacgtattctgccgttcctgtattgctaccagtctgaagaacaacaagtggacctgtccttattgccgggcatatcttccttcagaaggagttccagcaactgatgtagccaaaagaatgaaatcagagtataagaactgcgctgagtgtgacaccctggtttgcctcagtgaaatgagggcacatattcggacttgtcagaagtacatagataagtatggaccaggcagcggcagcggcagcggcagcggcagcggcagcgaagtgaaactggtggaaagcggcggcgatctggtgaaaccgggcggcagcctgaaactgagctgcgcggcgagcggctttacctttagccattatggcatgagctgggtgcgccagaccccggataaacgcctggaatgggtggcgaccattggcagccgcggcacctatacccattatccggatagcgtgaaaggccgctttaccattagccgcgataacgataaaaacgcgctgtatctgcagatgaacagcctgcgcaccgaagataccgcgatgtattattgcgcgcgcaaaagcgaattttattattatggcaacacctattattatagcgcgatggattattggggccagggcgcgagcgtgaccgtgagcagcggcggcggcggcagcggcggcggcgatagcggcggcggcggcagcgatattgtgctgacccagagcccggcgagcctggcggtgagcctgggccagcgcgcgaccattagctgccgcgcgagcgaaagcgtggataactatggctttagctttatgaactggtttcagcagaaaccgggccagccgccgaaactgctgatttatgcgaccagcaaccgcggcagcggcgtgccggcgcgctttagcggcagcggcagcggcaccgattttagcctgaacattcatccggtggaagaagatgatagcgcgatgtatttttgccagcagaccaaagaagtgccgtggacctttggcggcggcaccaaactggaaattaaacgctaa

SEQ ID NO: 1260 - DNA, 1494 bp, synthetic construct
  source 1..1494: mol_type = other DNA; note = 3DX.1-(GS)1-SPOP-NLS nucleic acid
atggaagtgaaactggtggaaagcggcggcgatctggtgaaaccgggcggcagcctgaaactgagctgcgcggcgagcggctttacctttagccattatggcatgagctgggtgcgccagaccccggataaacgcctggaatgggtggcgaccattggcagccgcggcacctatacccattatccggatagcgtgaaaggccgctttaccattagccgcgataacgataaaaacgcgctgtatctgcagatgaacagcctgcgcaccgaagataccgcgatgtattattgcgcgcgcaaaagcgaattttattattatggcaacacctattattatagcgcgatggattattggggccagggcgcgagcgtgaccgtgagcagcggcggcggcggcagcggcggcggcgatagcggcggcggcggcagcgatattgtgctgacccagagcccggcgagcctggcggtgagcctgggccagcgcgcgaccattagctgccgcgcgagcgaaagcgtggataactatggctttagctttatgaactggtttcagcagaaaccgggccagccgccgaaactgctgatttatgcgaccagcaaccgcggcagcggcgtgccggcgcgctttagcggcagcggcagcggcaccgattttagcctgaacattcatccggtggaagaagatgatagcgcgatgtatttttgccagcagaccaaagaagtgccgtggacctttggcggcggcaccaaactggaaattaaacgcggcagcaacgggcttctccctgatgacaagcttaccctcttctgcgaggtgagtgttgtgcaagattctgtcaacatttctggccagaataccatgaacatggtaaaggttcctgagtgccggctggcagatgagttaggaggactgtgggagaattcccggttcacagactgctgcttgtgtgttgccggccaggaattccaggctcacaaggctatcttagcagctcgttctccggtttttagtgccatgtttgaacatgaaatggaggagagcaaaaagaatcgagttgaaatcaatgatgtggagcctgaagtttttaaggaaatgatgtgcttcatttacacggggaaggctccaaacctcgacaaaatggctgatgatttgctggcagctgctgacaagtatgccctggagcgcttaaaggtcatgtgtgaggatgccctctgcagtaacctgtccgtggagaacgctgcagaaattctcatcctggccgacctccacagtgcagatcagttgaaaactcaggcagtggatttcatcaactatcatgcttcggatgtcttggagacctctgggtggaagtcaatggtggtgtcacatccccacttggtggctgaggcataccgctctctggcttcagcacagtgcccttttctgggacccccacgcaaacgcctgaagcaatccggcagcggcagcccggcggcgaaacgcgtgaaactggat

SEQ ID NO: 1261 - DNA, 1500 bp, synthetic construct
  source 1..1500: mol_type = other DNA; note = 3DX.1-(GS)2-SPOP-NLS nucleic acid
atggaagtgaaactggtggaaagcggcggcgatctggtgaaaccgggcggcagcctgaaactgagctgcgcggcgagcggctttacctttagccattatggcatgagctgggtgcgccagaccccggataaacgcctggaatgggtggcgaccattggcagccgcggcacctatacccattatccggatagcgtgaaaggccgctttaccattagccgcgataacgataaaaacgcgctgtatctgcagatgaacagcctgcgcaccgaagataccgcgatgtattattgcgcgcgcaaaagcgaattttattattatggcaacacctattattatagcgcgatggattattggggccagggcgcgagcgtgaccgtgagcagcggcggcggcggcagcggcggcggcgatagcggcggcggcggcagcgatattgtgctgacccagagcccggcgagcctggcggtgagcctgggccagcgcgcgaccattagctgccgcgcgagcgaaagcgtggataactatggctttagctttatgaactggtttcagcagaaaccgggccagccgccgaaactgctgatttatgcgaccagcaaccgcggcagcggcgtgccggcgcgctttagcggcagcggcagcggcaccgattttagcctgaacattcatccggtggaagaagatgatagcgcgatgtatttttgccagcagaccaaagaagtgccgtggacctttggcggcggcaccaaactggaaattaaacgcggcagcggcagcaacgggcttctccctgatgacaagcttaccctcttctgcgaggtgagtgttgtgcaagattctgtcaacatttctggccagaataccatgaacatggtaaaggttcctgagtgccggctggcagatgagttaggaggactgtgggagaattcccggttcacagactgctgcttgtgtgttgccggccaggaattccaggctcacaaggctatcttagcagctcgttctccggtttttagtgccatgtttgaacatgaaatggaggagagcaaaaagaatcgagttgaaatcaatgatgtggagcctgaagtttttaaggaaatgatgtgcttcatttacacggggaaggctccaaacctcgacaaaatggctgatgatttgctggcagctgctgacaagtatgccctggagcgcttaaaggtcatgtgtgaggatgccctctgcagtaacctgtccgtggagaacgctgcagaaattctcatcctggccgacctccacagtgcagatcagttgaaaactcaggcagtggatttcatcaactatcatgcttcggatgtcttggagacctctgggtggaagtcaatggtggtgtcacatccccacttggtggctgaggcataccgctctctggcttcagcacagtgcccttttctgggacccccacgcaaacgcctgaagcaatccggcagcggcagcccggcggcgaaacgcgtgaaactggat

SEQ ID NO: 1262 - DNA, 1506 bp, synthetic construct
  source 1..1506: mol_type = other DNA; note = 3DX.1-(GS)3-SPOP-NLS nucleic acid
atggaagtgaaactggtggaaagcggcggcgatctggtgaaaccgggcggcagcctgaaactgagctgcgcggcgagcggctttacctttagccattatggcatgagctgggtgcgccagaccccggataaacgcctggaatgggtggcgaccattggcagccgcggcacctatacccattatccggatagcgtgaaaggccgctttaccattagccgcgataacgataaaaacgcgctgtatctgcagatgaacagcctgcgcaccgaagataccgcgatgtattattgcgcgcgcaaaagcgaattttattattatggcaacacctattattatagcgcgatggattattggggccagggcgcgagcgtgaccgtgagcagcggcggcggcggcagcggcggcggcgatagcggcggcggcggcagcgatattgtgctgacccagagcccggcgagcctggcggtgagcctgggccagcgcgcgaccattagctgccgcgcgagcgaaagcgtggataactatggctttagctttatgaactggtttcagcagaaaccgggccagccgccgaaactgctgatttatgcgaccagcaaccgcggcagcggcgtgccggcgcgctttagcggcagcggcagcggcaccgattttagcctgaacattcatccggtggaagaagatgatagcgcgatgtatttttgccagcagaccaaagaagtgccgtggacctttggcggcggcaccaaactggaaattaaacgcggcagcggcagcggcagcaacgggcttctccctgatgacaagcttaccctcttctgcgaggtgagtgttgtgcaagattctgtcaacatttctggccagaataccatgaacatggtaaaggttcctgagtgccggctggcagatgagttaggaggactgtgggagaattcccggttcacagactgctgcttgtgtgttgccggccaggaattccaggctcacaaggctatcttagcagctcgttctccggtttttagtgccatgtttgaacatgaaatggaggagagcaaaaagaatcgagttgaaatcaatgatgtggagcctgaagtttttaaggaaatgatgtgcttcatttacacggggaaggctccaaacctcgacaaaatggctgatgatttgctggcagctgctgacaagtatgccctggagcgcttaaaggtcatgtgtgaggatgccctctgcagtaacctgtccgtggagaacgctgcagaaattctcatcctggccgacctccacagtgcagatcagttgaaaactcaggcagtggatttcatcaactatcatgcttcggatgtcttggagacctctgggtggaagtcaatggtggtgtcacatccccacttggtggctgaggcataccgctctctggcttcagcacagtgcccttttctgggacccccacgcaaacgcctgaagcaatccggcagcggcagcccggcggcgaaacgcgtgaaactggat

SEQ ID NO: 1263 - DNA, 1512 bp, synthetic construct
  source 1..1512: mol_type = other DNA; note = 3DX.1-(GS)4-SPOP-NLS nucleic acid
atggaagtgaaactggtggaaagcggcggcgatctggtgaaaccgggcggcagcctgaaactgagctgcgcggcgagcggctttacctttagccattatggcatgagctgggtgcgccagaccccggataaacgcctggaatgggtggcgaccattggcagccgcggcacctatacccattatccggatagcgtgaaaggccgctttaccattagccgcgataacgataaaaacgcgctgtatctgcagatgaacagcctgcgcaccgaagataccgcgatgtattattgcgcgcgcaaaagcgaattttattattatggcaacacctattattatagcgcgatggattattggggccagggcgcgagcgtgaccgtgagcagcggcggcggcggcagcggcggcggcgatagcggcggcggcggcagcgatattgtgctgacccagagcccggcgagcctggcggtgagcctgggccagcgcgcgaccattagctgccgcgcgagcgaaagcgtggataactatggctttagctttatgaactggtttcagcagaaaccgggccagccgccgaaactgctgatttatgcgaccagcaaccgcggcagcggcgtgccggcgcgctttagcggcagcggcagcggcaccgattttagcctgaacattcatccggtggaagaagatgatagcgcgatgtatttttgccagcagaccaaagaagtgccgtggacctttggcggcggcaccaaactggaaattaaacgcggcagcggcagcggcagcggcagcaacgggcttctccctgatgacaagcttaccctcttctgcgaggtgagtgttgtgcaagattctgtcaacatttctggccagaataccatgaacatggtaaaggttcctgagtgccggctggcagatgagttaggaggactgtgggagaattcccggttcacagactgctgcttgtgtgttgccggccaggaattccaggctcacaaggctatcttagcagctcgttctccggtttttagtgccatgtttgaacatgaaatggaggagagcaaaaagaatcgagttgaaatcaatgatgtggagcctgaagtttttaaggaaatgatgtgcttcatttacacggggaaggctccaaacctcgacaaaatggctgatgatttgctggcagctgctgacaagtatgccctggagcgcttaaaggtcatgtgtgaggatgccctctgcagtaacctgtccgtggagaacgctgcagaaattctcatcctggccgacctccacagtgcagatcagttgaaaactcaggcagtggatttcatcaactatcatgcttcggatgtcttggagacctctgggtggaagtcaatggtggtgtcacatccccacttggtggctgaggcataccgctctctggcttcagcacagtgcccttttctgggacccccacgcaaacgcctgaagcaatccggcagcggcagcccggcggcgaaacgcgtgaaactggat

SEQ ID NO: 1264 - DNA, 1518 bp, synthetic construct
  source 1..1518: mol_type = other DNA; note = 3DX.1-(GS)5-SPOP-NLS nucleic acid
atggaagtgaaactggtggaaagcggcggcgatctggtgaaaccgggcggcagcctgaaactgagctgcgcggcgagcggctttacctttagccattatggcatgagctgggtgcgccagaccccggataaacgcctggaatgggtggcgaccattggcagccgcggcacctatacccattatccggatagcgtgaaaggccgctttaccattagccgcgataacgataaaaacgcgctgtatctgcagatgaacagcctgcgcaccgaagataccgcgatgtattattgcgcgcgcaaaagcgaattttattattatggcaacacctattattatagcgcgatggattattggggccagggcgcgagcgtgaccgtgagcagcggcggcggcggcagcggcggcggcgatagcggcggcggcggcagcgatattgtgctgacccagagcccggcgagcctggcggtgagcctgggccagcgcgcgaccattagctgccgcgcgagcgaaagcgtggataactatggctttagctttatgaactggtttcagcagaaaccgggccagccgccgaaactgctgatttatgcgaccagcaaccgcggcagcggcgtgccggcgcgctttagcggcagcggcagcggcaccgattttagcctgaacattcatccggtggaagaagatgatagcgcgatgtatttttgccagcagaccaaagaagtgccgtggacctttggcggcggcaccaaactggaaattaaacgcggcagcggcagcggcagcggcagcggcagcaacgggcttctccctgatgacaagcttaccctcttctgcgaggtgagtgttgtgcaagattctgtcaacatttctggccagaataccatgaacatggtaaaggttcctgagtgccggctggcagatgagttaggaggactgtgggagaattcccggttcacagactgctgcttgtgtgttgccggccaggaattccaggctcacaaggctatcttagcagctcgttctccggtttttagtgccatgtttgaacatgaaatggaggagagcaaaaagaatcgagttgaaatcaatgatgtggagcctgaagtttttaaggaaatgatgtgcttcatttacacggggaaggctccaaacctcgacaaaatggctgatgatttgctggcagctgctgacaagtatgccctggagcgcttaaaggtcatgtgtgaggatgccctctgcagtaacctgtccgtggagaacgctgcagaaattctcatcctggccgacctccacagtgcagatcagttgaaaactcaggcagtggatttcatcaactatcatgcttcggatgtcttggagacctctgggtggaagtcaatggtggtgtcacatccccacttggtggctgaggcataccgctctctggcttcagcacagtgcccttttctgggacccccacgcaaacgcctgaagcaatccggcagcggcagcccggcggcgaaacgcgtgaaactggat

SEQ ID NO: 1265 - DNA, 1524 bp, synthetic construct
  source 1..1524: mol_type = other DNA; note = 3DX.1-(GS)6-SPOP-NLS nucleic acid
atggaagtgaaactggtggaaagcggcggcgatctggtgaaaccgggcggcagcctgaaactgagctgcgcggcgagcggctttacctttagccattatggcatgagctgggtgcgccagaccccggataaacgcctggaatgggtggcgaccattggcagccgcggcacctatacccattatccggatagcgtgaaaggccgctttaccattagccgcgataacgataaaaacgcgctgtatctgcagatgaacagcctgcgcaccgaagataccgcgatgtattattgcgcgcgcaaaagcgaattttattattatggcaacacctattattatagcgcgatggattattggggccagggcgcgagcgtgaccgtgagcagcggcggcggcggcagcggcggcggcgatagcggcggcggcggcagcgatattgtgctgacccagagcccggcgagcctggcggtgagcctgggccagcgcgcgaccattagctgccgcgcgagcgaaagcgtggataactatggctttagctttatgaactggtttcagcagaaaccgggccagccgccgaaactgctgatttatgcgaccagcaaccgcggcagcggcgtgccggcgcgctttagcggcagcggcagcggcaccgattttagcctgaacattcatccggtggaagaagatgatagcgcgatgtatttttgccagcagaccaaagaagtgccgtggacctttggcggcggcaccaaactggaaattaaacgcggcagcggcagcggcagcggcagcggcagcggcagcaacgggcttctccctgatgacaagcttaccctcttctgcgaggtgagtgttgtgcaagattctgtcaacatttctggccagaataccatgaacatggtaaaggttcctgagtgccggctggcagatgagttaggaggactgtgggagaattcccggttcacagactgctgcttgtgtgttgccggccaggaattccaggctcacaaggctatcttagcagctcgttctccggtttttagtgccatgtttgaacatgaaatggaggagagcaaaaagaatcgagttgaaatcaatgatgtggagcctgaagtttttaaggaaatgatgtgcttcatttacacggggaaggctccaaacctcgacaaaatggctgatgatttgctggcagctgctgacaagtatgccctggagcgcttaaaggtcatgtgtgaggatgccctctgcagtaacctgtccgtggagaacgctgcagaaattctcatcctggccgacctccacagtgcagatcagttgaaaactcaggcagtggatttcatcaactatcatgcttcggatgtcttggagacctctgggtggaagtcaatggtggtgtcacatccccacttggtggctgaggcataccgctctctggcttcagcacagtgcccttttctgggacccccacgcaaacgcctgaagcaatccggcagcggcagcccggcggcgaaacgcgtgaaactggat

SEQ ID NO: 1266 - DNA, 1524 bp, synthetic construct
  source 1..1524: mol_type = other DNA; note = 3DX.1-(GS)1-SPOP-NLS-HA nucleic acid
atggaagtgaaactggtggaaagcggcggcgatctggtgaaaccgggcggcagcctgaaactgagctgcgcggcgagcggctttacctttagccattatggcatgagctgggtgcgccagaccccggataaacgcctggaatgggtggcgaccattggcagccgcggcacctatacccattatccggatagcgtgaaaggccgctttaccattagccgcgataacgataaaaacgcgctgtatctgcagatgaacagcctgcgcaccgaagataccgcgatgtattattgcgcgcgcaaaagcgaattttattattatggcaacacctattattatagcgcgatggattattggggccagggcgcgagcgtgaccgtgagcagcggcggcggcggcagcggcggcggcgatagcggcggcggcggcagcgatattgtgctgacccagagcccggcgagcctggcggtgagcctgggccagcgcgcgaccattagctgccgcgcgagcgaaagcgtggataactatggctttagctttatgaactggtttcagcagaaaccgggccagccgccgaaactgctgatttatgcgaccagcaaccgcggcagcggcgtgccggcgcgctttagcggcagcggcagcggcaccgattttagcctgaacattcatccggtggaagaagatgatagcgcgatgtatttttgccagcagaccaaagaagtgccgtggacctttggcggcggcaccaaactggaaattaaacgcggcagcaacgggcttctccctgatgacaagcttaccctcttctgcgaggtgagtgttgtgcaagattctgtcaacatttctggccagaataccatgaacatggtaaaggttcctgagtgccggctggcagatgagttaggaggactgtgggagaattcccggttcacagactgctgcttgtgtgttgccggccaggaattccaggctcacaaggctatcttagcagctcgttctccggtttttagtgccatgtttgaacatgaaatggaggagagcaaaaagaatcgagttgaaatcaatgatgtggagcctgaagtttttaaggaaatgatgtgcttcatttacacggggaaggctccaaacctcgacaaaatggctgatgatttgctggcagctgctgacaagtatgccctggagcgcttaaaggtcatgtgtgaggatgccctctgcagtaacctgtccgtggagaacgctgcagaaattctcatcctggccgacctccacagtgcagatcagttgaaaactcaggcagtggatttcatcaactatcatgcttcggatgtcttggagacctctgggtggaagtcaatggtggtgtcacatccccacttggtggctgaggcataccgctctctggcttcagcacagtgcccttttctgggacccccacgcaaacgcctgaagcaatccggcagcggcagcccggcggcgaaacgcgtgaaactggattacccatacgatgttccagattacgcttaa

SEQ ID NO: 1267 - DNA, 1530 bp, synthetic construct
  source 1..1530: mol_type = other DNA; note = 3DX.1-(GS)2-SPOP-NLS-HA nucleic acid
atggaagtgaaactggtggaaagcggcggcgatctggtgaaaccgggcggcagcctgaaactgagctgcgcggcgagcggctttacctttagccattatggcatgagctgggtgcgccagaccccggataaacgcctggaatgggtggcgaccattggcagccgcggcacctatacccattatccggatagcgtgaaaggccgctttaccattagccgcgataacgataaaaacgcgctgtatctgcagatgaacagcctgcgcaccgaagataccgcgatgtattattgcgcgcgcaaaagcgaattttattattatggcaacacctattattatagcgcgatggattattggggccagggcgcgagcgtgaccgtgagcagcggcggcggcggcagcggcggcggcgatagcggcggcggcggcagcgatattgtgctgacccagagcccggcgagcctggcggtgagcctgggccagcgcgcgaccattagctgccgcgcgagcgaaagcgtggataactatggctttagctttatgaactggtttcagcagaaaccgggccagccgccgaaactgctgatttatgcgaccagcaaccgcggcagcggcgtgccggcgcgctttagcggcagcggcagcggcaccgattttagcctgaacattcatccggtggaagaagatgatagcgcgatgtatttttgccagcagaccaaagaagtgccgtggacctttggcggcggcaccaaactggaaattaaacgcggcagcggcagcaacgggcttctccctgatgacaagcttaccctcttctgcgaggtgagtgttgtgcaagattctgtcaacatttctggccagaataccatgaacatggtaaaggttcctgagtgccggctggcagatgagttaggaggactgtgggagaattcccggttcacagactgctgcttgtgtgttgccggccaggaattccaggctcacaaggctatcttagcagctcgttctccggtttttagtgccatgtttgaacatgaaatggaggagagcaaaaagaatcgagttgaaatcaatgatgtggagcctgaagtttttaaggaaatgatgtgcttcatttacacggggaaggctccaaacctcgacaaaatggctgatgatttgctggcagctgctgacaagtatgccctggagcgcttaaaggtcatgtgtgaggatgccctctgcagtaacctgtccgtggagaacgctgcagaaattctcatcctggccgacctccacagtgcagatcagttgaaaactcaggcagtggatttcatcaactatcatgcttcggatgtcttggagacctctgggtggaagtcaatggtggtgtcacatccccacttggtggctgaggcataccgctctctggcttcagcacagtgcccttttctgggacccccacgcaaacgcctgaagcaatccggcagcggcagcccggcggcgaaacgcgtgaaactggattacccatacgatgttccagattacgcttaa

SEQ ID NO: 1268 - DNA, 1536 bp, synthetic construct
  source 1..1536: mol_type = other DNA; note = 3DX.1-(GS)3-SPOP-NLS-HA nucleic acid
atggaagtgaaactggtggaaagcggcggcgatctggtgaaaccgggcggcagcctgaaactgagctgcgcggcgagcggctttacctttagccattatggcatgagctgggtgcgccagaccccggataaacgcctggaatgggtggcgaccattggcagccgcggcacctatacccattatccggatagcgtgaaaggccgctttaccattagccgcgataacgataaaaacgcgctgtatctgcagatgaacagcctgcgcaccgaagataccgcgatgtattattgcgcgcgcaaaagcgaattttattattatggcaacacctattattatagcgcgatggattattggggccagggcgcgagcgtgaccgtgagcagcggcggcggcggcagcggcggcggcgatagcggcggcggcggcagcgatattgtgctgacccagagcccggcgagcctggcggtgagcctgggccagcgcgcgaccattagctgccgcgcgagcgaaagcgtggataactatggctttagctttatgaactggtttcagcagaaaccgggccagccgccgaaactgctgatttatgcgaccagcaaccgcggcagcggcgtgccggcgcgctttagcggcagcggcagcggcaccgattttagcctgaacattcatccggtggaagaagatgatagcgcgatgtatttttgccagcagaccaaagaagtgccgtggacctttggcggcggcaccaaactggaaattaaacgcggcagcggcagcggcagcaacgggcttctccctgatgacaagcttaccctcttctgcgaggtgagtgttgtgcaagattctgtcaacatttctggccagaataccatgaacatggtaaaggttcctgagtgccggctggcagatgagttaggaggactgtgggagaattcccggttcacagactgctgcttgtgtgttgccggccaggaattccaggctcacaaggctatcttagcagctcgttctccggtttttagtgccatgtttgaacatgaaatggaggagagcaaaaagaatcgagttgaaatcaatgatgtggagcctgaagtttttaaggaaatgatgtgcttcatttacacggggaaggctccaaacctcgacaaaatggctgatgatttgctggcagctgctgacaagtatgccctggagcgcttaaaggtcatgtgtgaggatgccctctgcagtaacctgtccgtggagaacgctgcagaaattctcatcctggccgacctccacagtgcagatcagttgaaaactcaggcagtggatttcatcaactatcatgcttcggatgtcttggagacctctgggtggaagtcaatggtggtgtcacatccccacttggtggctgaggcataccgctctctggcttcagcacagtgcccttttctgggacccccacgcaaacgcctgaagcaatccggcagcggcagcccggcggcgaaacgcgtgaaactggattacccatacgatgttccagattacgcttaa

SEQ ID NO: 1269 - DNA, 1542 bp, synthetic construct
  source 1..1542: mol_type = other DNA; note = 3DX.1-(GS)4-SPOP-NLS-HA nucleic acid
atggaagtgaaactggtggaaagcggcggcgatctggtgaaaccgggcggcagcctgaaactgagctgcgcggcgagcggctttacctttagccattatggcatgagctgggtgcgccagaccccggataaacgcctggaatgggtggcgaccattggcagccgcggcacctatacccattatccggatagcgtgaaaggccgctttaccattagccgcgataacgataaaaacgcgctgtatctgcagatgaacagcctgcgcaccgaagataccgcgatgtattattgcgcgcgcaaaagcgaattttattattatggcaacacctattattatagcgcgatggattattggggccagggcgcgagcgtgaccgtgagcagcggcggcggcggcagcggcggcggcgatagcggcggcggcggcagcgatattgtgctgacccagagcccggcgagcctggcggtgagcctgggccagcgcgcgaccattagctgccgcgcgagcgaaagcgtggataactatggctttagctttatgaactggtttcagcagaaaccgggccagccgccgaaactgctgatttatgcgaccagcaaccgcggcagcggcgtgccggcgcgctttagcggcagcggcagcggcaccgattttagcctgaacattcatccggtggaagaagatgatagcgcgatgtatttttgccagcagaccaaagaagtgccgtggacctttggcggcggcaccaaactggaaattaaacgcggcagcggcagcggcagcggcagcaacgggcttctccctgatgacaagcttaccctcttctgcgaggtgagtgttgtgcaagattctgtcaacatttctggccagaataccatgaacatggtaaaggttcctgagtgccggctggcagatgagttaggaggactgtgggagaattcccggttcacagactgctgcttgtgtgttgccggccaggaattccaggctcacaaggctatcttagcagctcgttctccggtttttagtgccatgtttgaacatgaaatggaggagagcaaaaagaatcgagttgaaatcaatgatgtggagcctgaagtttttaaggaaatgatgtgcttcatttacacggggaaggctccaaacctcgacaaaatggctgatgatttgctggcagctgctgacaagtatgccctggagcgcttaaaggtcatgtgtgaggatgccctctgcagtaacctgtccgtggagaacgctgcagaaattctcatcctggccgacctccacagtgcagatcagttgaaaactcaggcagtggatttcatcaactatcatgcttcggatgtcttggagacctctgggtggaagtcaatggtggtgtcacatccccacttggtggctgaggcataccgctctctggcttcagcacagtgcccttttctgggacccccacgcaaacgcctgaagcaatccggcagcggcagcccggcggcgaaacgcgtgaaactggattacccatacgatgttccagattacgcttaa

SEQ ID NO: 1270 - DNA, 1548 bp, synthetic construct
  source 1..1548: mol_type = other DNA; note = 3DX.1-(GS)5-SPOP-NLS-HA nucleic acid
atggaagtgaaactggtggaaagcggcggcgatctggtgaaaccgggcggcagcctgaaactgagctgcgcggcgagcggctttacctttagccattatggcatgagctgggtgcgccagaccccggataaacgcctggaatgggtggcgaccattggcagccgcggcacctatacccattatccggatagcgtgaaaggccgctttaccattagccgcgataacgataaaaacgcgctgtatctgcagatgaacagcctgcgcaccgaagataccgcgatgtattattgcgcgcgcaaaagcgaattttattattatggcaacacctattattatagcgcgatggattattggggccagggcgcgagcgtgaccgtgagcagcggcggcggcggcagcggcggcggcgatagcggcggcggcggcagcgatattgtgctgacccagagcccggcgagcctggcggtgagcctgggccagcgcgcgaccattagctgccgcgcgagcgaaagcgtggataactatggctttagctttatgaactggtttcagcagaaaccgggccagccgccgaaactgctgatttatgcgaccagcaaccgcggcagcggcgtgccggcgcgctttagcggcagcggcagcggcaccgattttagcctgaacattcatccggtggaagaagatgatagcgcgatgtatttttgccagcagaccaaagaagtgccgtggacctttggcggcggcaccaaactggaaattaaacgcggcagcggcagcggcagcggcagcggcagcaacgggcttctccctgatgacaagcttaccctcttctgcgaggtgagtgttgtgcaagattctgtcaacatttctggccagaataccatgaacatggtaaaggttcctgagtgccggctggcagatgagttaggaggactgtgggagaattcccggttcacagactgctgcttgtgtgttgccggccaggaattccaggctcacaaggctatcttagcagctcgttctccggtttttagtgccatgtttgaacatgaaatggaggagagcaaaaagaatcgagttgaaatcaatgatgtggagcctgaagtttttaaggaaatgatgtgcttcatttacacggggaaggctccaaacctcgacaaaatggctgatgatttgctggcagctgctgacaagtatgccctggagcgcttaaaggtcatgtgtgaggatgccctctgcagtaacctgtccgtggagaacgctgcagaaattctcatcctggccgacctccacagtgcagatcagttgaaaactcaggcagtggatttcatcaactatcatgcttcggatgtcttggagacctctgggtggaagtcaatggtggtgtcacatccccacttggtggctgaggcataccgctctctggcttcagcacagtgcccttttctgggacccccacgcaaacgcctgaagcaatccggcagcggcagcccggcggcgaaacgcgtgaaactggattacccatacgatgttccagattacgcttaa

SEQ ID NO: 1271 - DNA, 1554 bp, synthetic construct
  source 1..1554: mol_type = other DNA; note = 3DX.1-(GS)6-SPOP-NLS-HA nucleic acid
atggaagtgaaactggtggaaagcggcggcgatctggtgaaaccgggcggcagcctgaaactgagctgcgcggcgagcggctttacctttagccattatggcatgagctgggtgcgccagaccccggataaacgcctggaatgggtggcgaccattggcagccgcggcacctatacccattatccggatagcgtgaaaggccgctttaccattagccgcgataacgataaaaacgcgctgtatctgcagatgaacagcctgcgcaccgaagataccgcgatgtattattgcgcgcgcaaaagcgaattttattattatggcaacacctattattatagcgcgatggattattggggccagggcgcgagcgtgaccgtgagcagcggcggcggcggcagcggcggcggcgatagcggcggcggcggcagcgatattgtgctgacccagagcccggcgagcctggcggtgagcctgggccagcgcgcgaccattagctgccgcgcgagcgaaagcgtggataactatggctttagctttatgaactggtttcagcagaaaccgggccagccgccgaaactgctgatttatgcgaccagcaaccgcggcagcggcgtgccggcgcgctttagcggcagcggcagcggcaccgattttagcctgaacattcatccggtggaagaagatgatagcgcgatgtatttttgccagcagaccaaagaagtgccgtggacctttggcggcggcaccaaactggaaattaaacgcggcagcggcagcggcagcggcagcggcagcggcagcaacgggcttctccctgatgacaagcttaccctcttctgcgaggtgagtgttgtgcaagattctgtcaacatttctggccagaataccatgaacatggtaaaggttcctgagtgccggctggcagatgagttaggaggactgtgggagaattcccggttcacagactgctgcttgtgtgttgccggccaggaattccaggctcacaaggctatcttagcagctcgttctccggtttttagtgccatgtttgaacatgaaatggaggagagcaaaaagaatcgagttgaaatcaatgatgtggagcctgaagtttttaaggaaatgatgtgcttcatttacacggggaaggctccaaacctcgacaaaatggctgatgatttgctggcagctgctgacaagtatgccctggagcgcttaaaggtcatgtgtgaggatgccctctgcagtaacctgtccgtggagaacgctgcagaaattctcatcctggccgacctccacagtgcagatcagttgaaaactcaggcagtggatttcatcaactatcatgcttcggatgtcttggagacctctgggtggaagtcaatggtggtgtcacatccccacttggtggctgaggcataccgctctctggcttcagcacagtgcccttttctgggacccccacgcaaacgcctgaagcaatccggcagcggcagcccggcggcgaaacgcgtgaaactggattacccatacgatgttccagattacgcttaa

SEQ ID NO: 1272 - DNA, 1338 bp, synthetic construct
  source 1..1338: mol_type = other DNA; note = 3DX.2-(GS)1-CHIP-NLS nucleic acid
atggatattgtgctgacccagagcccggcgagcctggcggtgagcctgggccagcgcgcgaccattagctgccgcgcgagcgaaagcgtggataactatggctttagctttatgaactggtttcagcagaaaccgggccagccgccgaaactgctgatttatgcgaccagcaaccgcggcagcggcgtgccggcgcgctttagcggcagcggcagcggcaccgattttagcctgaacattcatccggtggaagaagatgatagcgcgatgtatttttgccagcagaccaaagaagtgccgtggacctttggcggcggcaccaaactggaaattaaacgcggcggcggcggcagcggcggcggcgatagcggcggcggcggcagcgaagtgaaactggtggaaagcggcggcgatctggtgaaaccgggcggcagcctgaaactgagctgcgcggcgagcggctttacctttagccattatggcatgagctgggtgcgccagaccccggataaacgcctggaatgggtggcgaccattggcagccgcggcacctatacccattatccggatagcgtgaaaggccgctttaccattagccgcgataacgataaaaacgcgctgtatctgcagatgaacagcctgcgcaccgaagataccgcgatgtattattgcgcgcgcaaaagcgaattttattattatggcaacacctattattatagcgcgatggattattggggccagggcgcgagcgtgaccgtgagcagcggcagccggctgaacttcggggacgacatccccagcgctcttcgaatcgcgaagaagaagcgctggaacagcattgaggagcggcgcatccaccaggagagcgagctgcactcctacctctccaggctcattgccgcggagcgtgagagggagctggaagagtgccagcgaaaccacgagggtgatgaggacgacagccacgtccgggcccagcaggcctgcattgaggccaagcacgacaagtacatggcggacatggacgagcttttttctcaggtggatgagaagaggaagaagcgagacatccccgactacctgtgtggcaagatcagctttgagctgatgcgggagccgtgcatcacgcccagtggcatcacctacgaccgcaaggacatcgaggagcacctgcagcgtgtgggtcattttgacccggtgaccaggagccccctgacccaggaacagctcatccccaacttggctatgaaggaggttattgacgcattcatctctgagaatggctgggtggaggactacggcagcggcagcccggcggcgaaacgcgtgaaactggat

SEQ ID NO: 1273 - DNA, 1344 bp, synthetic construct
  source 1..1344: mol_type = other DNA; note = 3DX.2-(GS)2-CHIP-NLS nucleic acid
atggatattgtgctgacccagagcccggcgagcctggcggtgagcctgggccagcgcgcgaccattagctgccgcgcgagcgaaagcgtggataactatggctttagctttatgaactggtttcagcagaaaccgggccagccgccgaaactgctgatttatgcgaccagcaaccgcggcagcggcgtgccggcgcgctttagcggcagcggcagcggcaccgattttagcctgaacattcatccggtggaagaagatgatagcgcgatgtatttttgccagcagaccaaagaagtgccgtggacctttggcggcggcaccaaactggaaattaaacgcggcggcggcggcagcggcggcggcgatagcggcggcggcggcagcgaagtgaaactggtggaaagcggcggcgatctggtgaaaccgggcggcagcctgaaactgagctgcgcggcgagcggctttacctttagccattatggcatgagctgggtgcgccagaccccggataaacgcctggaatgggtggcgaccattggcagccgcggcacctatacccattatccggatagcgtgaaaggccgctttaccattagccgcgataacgataaaaacgcgctgtatctgcagatgaacagcctgcgcaccgaagataccgcgatgtattattgcgcgcgcaaaagcgaattttattattatggcaacacctattattatagcgcgatggattattggggccagggcgcgagcgtgaccgtgagcagcggcagcggcagccggctgaacttcggggacgacatccccagcgctcttcgaatcgcgaagaagaagcgctggaacagcattgaggagcggcgcatccaccaggagagcgagctgcactcctacctctccaggctcattgccgcggagcgtgagagggagctggaagagtgccagcgaaaccacgagggtgatgaggacgacagccacgtccgggcccagcaggcctgcattgaggccaagcacgacaagtacatggcggacatggacgagcttttttctcaggtggatgagaagaggaagaagcgagacatccccgactacctgtgtggcaagatcagctttgagctgatgcgggagccgtgcatcacgcccagtggcatcacctacgaccgcaaggacatcgaggagcacctgcagcgtgtgggtcattttgacccggtgaccaggagccccctgacccaggaacagctcatccccaacttggctatgaaggaggttattgacgcattcatctctgagaatggctgggtggaggactacggcagcggcagcccggcggcgaaacgcgtgaaactggat

SEQ ID NO: 1274 - DNA, 1350 bp, synthetic construct
  source 1..1350: mol_type = other DNA; note = 3DX.2-(GS)3-CHIP-NLS nucleic acid
atggatattgtgctgacccagagcccggcgagcctggcggtgagcctgggccagcgcgcgaccattagctgccgcgcgagcgaaagcgtggataactatggctttagctttatgaactggtttcagcagaaaccgggccagccgccgaaactgctgatttatgcgaccagcaaccgcggcagcggcgtgccggcgcgctttagcggcagcggcagcggcaccgattttagcctgaacattcatccggtggaagaagatgatagcgcgatgtatttttgccagcagaccaaagaagtgccgtggacctttggcggcggcaccaaactggaaattaaacgcggcggcggcggcagcggcggcggcgatagcggcggcggcggcagcgaagtgaaactggtggaaagcggcggcgatctggtgaaaccgggcggcagcctgaaactgagctgcgcggcgagcggctttacctttagccattatggcatgagctgggtgcgccagaccccggataaacgcctggaatgggtggcgaccattggcagccgcggcacctatacccattatccggatagcgtgaaaggccgctttaccattagccgcgataacgataaaaacgcgctgtatctgcagatgaacagcctgcgcaccgaagataccgcgatgtattattgcgcgcgcaaaagcgaattttattattatggcaacacctattattatagcgcgatggattattggggccagggcgcgagcgtgaccgtgagcagcggcagcggcagcggcagccggctgaacttcggggacgacatccccagcgctcttcgaatcgcgaagaagaagcgctggaacagcattgaggagcggcgcatccaccaggagagcgagctgcactcctacctctccaggctcattgccgcggagcgtgagagggagctggaagagtgccagcgaaaccacgagggtgatgaggacgacagccacgtccgggcccagcaggcctgcattgaggccaagcacgacaagtacatggcggacatggacgagcttttttctcaggtggatgagaagaggaagaagcgagacatccccgactacctgtgtggcaagatcagctttgagctgatgcgggagccgtgcatcacgcccagtggcatcacctacgaccgcaaggacatcgaggagcacctgcagcgtgtgggtcattttgacccggtgaccaggagccccctgacccaggaacagctcatccccaacttggctatgaaggaggttattgacgcattcatctctgagaatggctgggtggaggactacggcagcggcagcccggcggcgaaacgcgtgaaactggat

SEQ ID NO: 1275 - DNA, 1356 bp, synthetic construct
  source 1..1356: mol_type = other DNA; note = 3DX.2-(GS)4-CHIP-NLS nucleic acid
atggatattgtgctgacccagagcccggcgagcctggcggtgagcctgggccagcgcgcgaccattagctgccgcgcgagcgaaagcgtggataactatggctttagctttatgaactggtttcagcagaaaccgggccagccgccgaaactgctgatttatgcgaccagcaaccgcggcagcggcgtgccggcgcgctttagcggcagcggcagcggcaccgattttagcctgaacattcatccggtggaagaagatgatagcgcgatgtatttttgccagcagaccaaagaagtgccgtggacctttggcggcggcaccaaactggaaattaaacgcggcggcggcggcagcggcggcggcgatagcggcggcggcggcagcgaagtgaaactggtggaaagcggcggcgatctggtgaaaccgggcggcagcctgaaactgagctgcgcggcgagcggctttacctttagccattatggcatgagctgggtgcgccagaccccggataaacgcctggaatgggtggcgaccattggcagccgcggcacctatacccattatccggatagcgtgaaaggccgctttaccattagccgcgataacgataaaaacgcgctgtatctgcagatgaacagcctgcgcaccgaagataccgcgatgtattattgcgcgcgcaaaagcgaattttattattatggcaacacctattattatagcgcgatggattattggggccagggcgcgagcgtgaccgtgagcagcggcagcggcagcggcagcggcagccggctgaacttcggggacgacatccccagcgctcttcgaatcgcgaagaagaagcgctggaacagcattgaggagcggcgcatccaccaggagagcgagctgcactcctacctctccaggctcattgccgcggagcgtgagagggagctggaagagtgccagcgaaaccacgagggtgatgaggacgacagccacgtccgggcccagcaggcctgcattgaggccaagcacgacaagtacatggcggacatggacgagcttttttctcaggtggatgagaagaggaagaagcgagacatccccgactacctgtgtggcaagatcagctttgagctgatgcgggagccgtgcatcacgcccagtggcatcacctacgaccgcaaggacatcgaggagcacctgcagcgtgtgggtcattttgacccggtgaccaggagccccctgacccaggaacagctcatccccaacttggctatgaaggaggttattgacgcattcatctctgagaatggctgggtggaggactacggcagcggcagcccggcggcgaaacgcgtgaaactggat

SEQ ID NO: 1276 - DNA, 1362 bp, synthetic construct
  source 1..1362: mol_type = other DNA; note = 3DX.2-(GS)5-CHIP-NLS nucleic acid
atggatattgtgctgacccagagcccggcgagcctggcggtgagcctgggccagcgcgcgaccattagctgccgcgcgagcgaaagcgtggataactatggctttagctttatgaactggtttcagcagaaaccgggccagccgccgaaactgctgatttatgcgaccagcaaccgcggcagcggcgtgccggcgcgctttagcggcagcggcagcggcaccgattttagcctgaacattcatccggtggaagaagatgatagcgcgatgtatttttgccagcagaccaaagaagtgccgtggacctttggcggcggcaccaaactggaaattaaacgcggcggcggcggcagcggcggcggcgatagcggcggcggcggcagcgaagtgaaactggtggaaagcggcggcgatctggtgaaaccgggcggcagcctgaaactgagctgcgcggcgagcggctttacctttagccattatggcatgagctgggtgcgccagaccccggataaacgcctggaatgggtggcgaccattggcagccgcggcacctatacccattatccggatagcgtgaaaggccgctttaccattagccgcgataacgataaaaacgcgctgtatctgcagatgaacagcctgcgcaccgaagataccgcgatgtattattgcgcgcgcaaaagcgaattttattattatggcaacacctattattatagcgcgatggattattggggccagggcgcgagcgtgaccgtgagcagcggcagcggcagcggcagcggcagcggcagccggctgaacttcggggacgacatccccagcgctcttcgaatcgcgaagaagaagcgctggaacagcattgaggagcggcgcatccaccaggagagcgagctgcactcctacctctccaggctcattgccgcggagcgtgagagggagctggaagagtgccagcgaaaccacgagggtgatgaggacgacagccacgtccgggcccagcaggcctgcattgaggccaagcacgacaagtacatggcggacatggacgagcttttttctcaggtggatgagaagaggaagaagcgagacatccccgactacctgtgtggcaagatcagctttgagctgatgcgggagccgtgcatcacgcccagtggcatcacctacgaccgcaaggacatcgaggagcacctgcagcgtgtgggtcattttgacccggtgaccaggagccccctgacccaggaacagctcatccccaacttggctatgaaggaggttattgacgcattcatctctgagaatggctgggtggaggactacggcagcggcagcccggcggcgaaacgcgtgaaactggat

SEQ ID NO: 1277 - DNA, 1368 bp, synthetic construct
  source 1..1368: mol_type = other DNA; note = 3DX.2-(GS)6-CHIP-NLS nucleic acid
atggatattgtgctgacccagagcccggcgagcctggcggtgagcctgggccagcgcgcgaccattagctgccgcgcgagcgaaagcgtggataactatggctttagctttatgaactggtttcagcagaaaccgggccagccgccgaaactgctgatttatgcgaccagcaaccgcggcagcggcgtgccggcgcgctttagcggcagcggcagcggcaccgattttagcctgaacattcatccggtggaagaagatgatagcgcgatgtatttttgccagcagaccaaagaagtgccgtggacctttggcggcggcaccaaactggaaattaaacgcggcggcggcggcagcggcggcggcgatagcggcggcggcggcagcgaagtgaaactggtggaaagcggcggcgatctggtgaaaccgggcggcagcctgaaactgagctgcgcggcgagcggctttacctttagccattatggcatgagctgggtgcgccagaccccggataaacgcctggaatgggtggcgaccattggcagccgcggcacctatacccattatccggatagcgtgaaaggccgctttaccattagccgcgataacgataaaaacgcgctgtatctgcagatgaacagcctgcgcaccgaagataccgcgatgtattattgcgcgcgcaaaagcgaattttattattatggcaacacctattattatagcgcgatggattattggggccagggcgcgagcgtgaccgtgagcagcggcagcggcagcggcagcggcagcggcagcggcagccggctgaacttcggggacgacatccccagcgctcttcgaatcgcgaagaagaagcgctggaacagcattgaggagcggcgcatccaccaggagagcgagctgcactcctacctctccaggctcattgccgcggagcgtgagagggagctggaagagtgccagcgaaaccacgagggtgatgaggacgacagccacgtccgggcccagcaggcctgcattgaggccaagcacgacaagtacatggcggacatggacgagcttttttctcaggtggatgagaagaggaagaagcgagacatccccgactacctgtgtggcaagatcagctttgagctgatgcgggagccgtgcatcacgcccagtggcatcacctacgaccgcaaggacatcgaggagcacctgcagcgtgtgggtcattttgacccggtgaccaggagccccctgacccaggaacagctcatccccaacttggctatgaaggaggttattgacgcattcatctctgagaatggctgggtggaggactacggcagcggcagcccggcggcgaaacgcgtgaaactggat

SEQ ID NO: 1278 - DNA, 1368 bp, synthetic construct
  source 1..1368: mol_type = other DNA; note = 3DX.2-(GS)1-CHIP-NLS-HA nucleic acid
atggatattgtgctgacccagagcccggcgagcctggcggtgagcctgggccagcgcgcgaccattagctgccgcgcgagcgaaagcgtggataactatggctttagctttatgaactggtttcagcagaaaccgggccagccgccgaaactgctgatttatgcgaccagcaaccgcggcagcggcgtgccggcgcgctttagcggcagcggcagcggcaccgattttagcctgaacattcatccggtggaagaagatgatagcgcgatgtatttttgccagcagaccaaagaagtgccgtggacctttggcggcggcaccaaactggaaattaaacgcggcggcggcggcagcggcggcggcgatagcggcggcggcggcagcgaagtgaaactggtggaaagcggcggcgatctggtgaaaccgggcggcagcctgaaactgagctgcgcggcgagcggctttacctttagccattatggcatgagctgggtgcgccagaccccggataaacgcctggaatgggtggcgaccattggcagccgcggcacctatacccattatccggatagcgtgaaaggccgctttaccattagccgcgataacgataaaaacgcgctgtatctgcagatgaacagcctgcgcaccgaagataccgcgatgtattattgcgcgcgcaaaagcgaattttattattatggcaacacctattattatagcgcgatggattattggggccagggcgcgagcgtgaccgtgagcagcggcagccggctgaacttcggggacgacatccccagcgctcttcgaatcgcgaagaagaagcgctggaacagcattgaggagcggcgcatccaccaggagagcgagctgcactcctacctctccaggctcattgccgcggagcgtgagagggagctggaagagtgccagcgaaaccacgagggtgatgaggacgacagccacgtccgggcccagcaggcctgcattgaggccaagcacgacaagtacatggcggacatggacgagcttttttctcaggtggatgagaagaggaagaagcgagacatccccgactacctgtgtggcaagatcagctttgagctgatgcgggagccgtgcatcacgcccagtggcatcacctacgaccgcaaggacatcgaggagcacctgcagcgtgtgggtcattttgacccggtgaccaggagccccctgacccaggaacagctcatccccaacttggctatgaaggaggttattgacgcattcatctctgagaatggctgggtggaggactacggcagcggcagcccggcggcgaaacgcgtgaaactggattacccatacgatgttccagattacgcttaa

SEQ ID NO: 1279 - DNA, 1374 bp, synthetic construct
  source 1..1374: mol_type = other DNA; note = 3DX.2-(GS)2-CHIP-NLS-HA nucleic acid
atggatattgtgctgacccagagcccggcgagcctggcggtgagcctgggccagcgcgcgaccattagctgccgcgcgagcgaaagcgtggataactatggctttagctttatgaactggtttcagcagaaaccgggccagccgccgaaactgctgatttatgcgaccagcaaccgcggcagcggcgtgccggcgcgctttagcggcagcggcagcggcaccgattttagcctgaacattcatccggtggaagaagatgatagcgcgatgtatttttgccagcagaccaaagaagtgccgtggacctttggcggcggcaccaaactggaaattaaacgcggcggcggcggcagcggcggcggcgatagcggcggcggcggcagcgaagtgaaactggtggaaagcggcggcgatctggtgaaaccgggcggcagcctgaaactgagctgcgcggcgagcggctttacctttagccattatggcatgagctgggtgcgccagaccccggataaacgcctggaatgggtggcgaccattggcagccgcggcacctatacccattatccggatagcgtgaaaggccgctttaccattagccgcgataacgataaaaacgcgctgtatctgcagatgaacagcctgcgcaccgaagataccgcgatgtattattgcgcgcgcaaaagcgaattttattattatggcaacacctattattatagcgcgatggattattggggccagggcgcgagcgtgaccgtgagcagcggcagcggcagccggctgaacttcggggacgacatccccagcgctcttcgaatcgcgaagaagaagcgctggaacagcattgaggagcggcgcatccaccaggagagcgagctgcactcctacctctccaggctcattgccgcggagcgtgagagggagctggaagagtgccagcgaaaccacgagggtgatgaggacgacagccacgtccgggcccagcaggcctgcattgaggccaagcacgacaagtacatggcggacatggacgagcttttttctcaggtggatgagaagaggaagaagcgagacatccccgactacctgtgtggcaagatcagctttgagctgatgcgggagccgtgcatcacgcccagtggcatcacctacgaccgcaaggacatcgaggagcacctgcagcgtgtgggtcattttgacccggtgaccaggagccccctgacccaggaacagctcatccccaacttggctatgaaggaggttattgacgcattcatctctgagaatggctgggtggaggactacggcagcggcagcccggcggcgaaacgcgtgaaactggattacccatacgatgttccagattacgcttaa

SEQ ID NO: 1280 - DNA, 1380 bp, synthetic construct
  source 1..1380: mol_type = other DNA; note = 3DX.2-(GS)3-CHIP-NLS-HA nucleic acid
atggatattgtgctgacccagagcccggcgagcctggcggtgagcctgggccagcgcgcgaccattagctgccgcgcgagcgaaagcgtggataactatggctttagctttatgaactggtttcagcagaaaccgggccagccgccgaaactgctgatttatgcgaccagcaaccgcggcagcggcgtgccggcgcgctttagcggcagcggcagcggcaccgattttagcctgaacattcatccggtggaagaagatgatagcgcgatgtatttttgccagcagaccaaagaagtgccgtggacctttggcggcggcaccaaactggaaattaaacgcggcggcggcggcagcggcggcggcgatagcggcggcggcggcagcgaagtgaaactggtggaaagcggcggcgatctggtgaaaccgggcggcagcctgaaactgagctgcgcggcgagcggctttacctttagccattatggcatgagctgggtgcgccagaccccggataaacgcctggaatgggtggcgaccattggcagccgcggcacctatacccattatccggatagcgtgaaaggccgctttaccattagccgcgataacgataaaaacgcgctgtatctgcagatgaacagcctgcgcaccgaagataccgcgatgtattattgcgcgcgcaaaagcgaattttattattatggcaacacctattattatagcgcgatggattattggggccagggcgcgagcgtgaccgtgagcagcggcagcggcagcggcagccggctgaacttcggggacgacatccccagcgctcttcgaatcgcgaagaagaagcgctggaacagcattgaggagcggcgcatccaccaggagagcgagctgcactcctacctctccaggctcattgccgcggagcgtgagagggagctggaagagtgccagcgaaaccacgagggtgatgaggacgacagccacgtccgggcccagcaggcctgcattgaggccaagcacgacaagtacatggcggacatggacgagcttttttctcaggtggatgagaagaggaagaagcgagacatccccgactacctgtgtggcaagatcagctttgagctgatgcgggagccgtgcatcacgcccagtggcatcacctacgaccgcaaggacatcgaggagcacctgcagcgtgtgggtcattttgacccggtgaccaggagccccctgacccaggaacagctcatccccaacttggctatgaaggaggttattgacgcattcatctctgagaatggctgggtggaggactacggcagcggcagcccggcggcgaaacgcgtgaaactggattacccatacgatgttccagattacgcttaa

SEQ ID NO: 1281 - DNA, 1386 bp, synthetic construct
  source 1..1386: mol_type = other DNA; note = 3DX.2-(GS)4-CHIP-NLS-HA nucleic acid
atggatattgtgctgacccagagcccggcgagcctggcggtgagcctgggccagcgcgcgaccattagctgccgcgcgagcgaaagcgtggataactatggctttagctttatgaactggtttcagcagaaaccgggccagccgccgaaactgctgatttatgcgaccagcaaccgcggcagcggcgtgccggcgcgctttagcggcagcggcagcggcaccgattttagcctgaacattcatccggtggaagaagatgatagcgcgatgtatttttgccagcagaccaaagaagtgccgtggacctttggcggcggcaccaaactggaaattaaacgcggcggcggcggcagcggcggcggcgatagcggcggcggcggcagcgaagtgaaactggtggaaagcggcggcgatctggtgaaaccgggcggcagcctgaaactgagctgcgcggcgagcggctttacctttagccattatggcatgagctgggtgcgccagaccccggataaacgcctggaatgggtggcgaccattggcagccgcggcacctatacccattatccggatagcgtgaaaggccgctttaccattagccgcgataacgataaaaacgcgctgtatctgcagatgaacagcctgcgcaccgaagataccgcgatgtattattgcgcgcgcaaaagcgaattttattattatggcaacacctattattatagcgcgatggattattggggccagggcgcgagcgtgaccgtgagcagcggcagcggcagcggcagcggcagccggctgaacttcggggacgacatccccagcgctcttcgaatcgcgaagaagaagcgctggaacagcattgaggagcggcgcatccaccaggagagcgagctgcactcctacctctccaggctcattgccgcggagcgtgagagggagctggaagagtgccagcgaaaccacgagggtgatgaggacgacagccacgtccgggcccagcaggcctgcattgaggccaagcacgacaagtacatggcggacatggacgagcttttttctcaggtggatgagaagaggaagaagcgagacatccccgactacctgtgtggcaagatcagctttgagctgatgcgggagccgtgcatcacgcccagtggcatcacctacgaccgcaaggacatcgaggagcacctgcagcgtgtgggtcattttgacccggtgaccaggagccccctgacccaggaacagctcatccccaacttggctatgaaggaggttattgacgcattcatctctgagaatggctgggtggaggactacggcagcggcagcccggcggcgaaacgcgtgaaactggattacccatacgatgttccagattacgcttaa

SEQ ID NO: 1282 - DNA, 1392 bp, synthetic construct
  source 1..1392: mol_type = other DNA; note = 3DX.2-(GS)5-CHIP-NLS-HA nucleic acid
atggatattgtgctgacccagagcccggcgagcctggcggtgagcctgggccagcgcgcgaccattagctgccgcgcgagcgaaagcgtggataactatggctttagctttatgaactggtttcagcagaaaccgggccagccgccgaaactgctgatttatgcgaccagcaaccgcggcagcggcgtgccggcgcgctttagcggcagcggcagcggcaccgattttagcctgaacattcatccggtggaagaagatgatagcgcgatgtatttttgccagcagaccaaagaagtgccgtggacctttggcggcggcaccaaactggaaattaaacgcggcggcggcggcagcggcggcggcgatagcggcggcggcggcagcgaagtgaaactggtggaaagcggcggcgatctggtgaaaccgggcggcagcctgaaactgagctgcgcggcgagcggctttacctttagccattatggcatgagctgggtgcgccagaccccggataaacgcctggaatgggtggcgaccattggcagccgcggcacctatacccattatccggatagcgtgaaaggccgctttaccattagccgcgataacgataaaaacgcgctgtatctgcagatgaacagcctgcgcaccgaagataccgcgatgtattattgcgcgcgcaaaagcgaattttattattatggcaacacctattattatagcgcgatggattattggggccagggcgcgagcgtgaccgtgagcagcggcagcggcagcggcagcggcagcggcagccggctgaacttcggggacgacatccccagcgctcttcgaatcgcgaagaagaagcgctggaacagcattgaggagcggcgcatccaccaggagagcgagctgcactcctacctctccaggctcattgccgcggagcgtgagagggagctggaagagtgccagcgaaaccacgagggtgatgaggacgacagccacgtccgggcccagcaggcctgcattgaggccaagcacgacaagtacatggcggacatggacgagcttttttctcaggtggatgagaagaggaagaagcgagacatccccgactacctgtgtggcaagatcagctttgagctgatgcgggagccgtgcatcacgcccagtggcatcacctacgaccgcaaggacatcgaggagcacctgcagcgtgtgggtcattttgacccggtgaccaggagccccctgacccaggaacagctcatccccaacttggctatgaaggaggttattgacgcattcatctctgagaatggctgggtggaggactacggcagcggcagcccggcggcgaaacgcgtgaaactggattacccatacgatgttccagattacgcttaa

SEQ ID NO: 1283 - DNA, 1398 bp, synthetic construct
  source 1..1398: mol_type = other DNA; note = 3DX.2-(GS)6-CHIP-NLS-HA nucleic acid
atggatattgtgctgacccagagcccggcgagcctggcggtgagcctgggccagcgcgcgaccattagctgccgcgcgagcgaaagcgtggataactatggctttagctttatgaactggtttcagcagaaaccgggccagccgccgaaactgctgatttatgcgaccagcaaccgcggcagcggcgtgccggcgcgctttagcggcagcggcagcggcaccgattttagcctgaacattcatccggtggaagaagatgatagcgcgatgtatttttgccagcagaccaaagaagtgccgtggacctttggcggcggcaccaaactggaaattaaacgcggcggcggcggcagcggcggcggcgatagcggcggcggcggcagcgaagtgaaactggtggaaagcggcggcgatctggtgaaaccgggcggcagcctgaaactgagctgcgcggcgagcggctttacctttagccattatggcatgagctgggtgcgccagaccccggataaacgcctggaatgggtggcgaccattggcagccgcggcacctatacccattatccggatagcgtgaaaggccgctttaccattagccgcgataacgataaaaacgcgctgtatctgcagatgaacagcctgcgcaccgaagataccgcgatgtattattgcgcgcgcaaaagcgaattttattattatggcaacacctattattatagcgcgatggattattggggccagggcgcgagcgtgaccgtgagcagcggcagcggcagcggcagcggcagcggcagcggcagccggctgaacttcggggacgacatccccagcgctcttcgaatcgcgaagaagaagcgctggaacagcattgaggagcggcgcatccaccaggagagcgagctgcactcctacctctccaggctcattgccgcggagcgtgagagggagctggaagagtgccagcgaaaccacgagggtgatgaggacgacagccacgtccgggcccagcaggcctgcattgaggccaagcacgacaagtacatggcggacatggacgagcttttttctcaggtggatgagaagaggaagaagcgagacatccccgactacctgtgtggcaagatcagctttgagctgatgcgggagccgtgcatcacgcccagtggcatcacctacgaccgcaaggacatcgaggagcacctgcagcgtgtgggtcattttgacccggtgaccaggagccccctgacccaggaacagctcatccccaacttggctatgaaggaggttattgacgcattcatctctgagaatggctgggtggaggactacggcagcggcagcccggcggcgaaacgcgtgaaactggattacccatacgatgttccagattacgcttaa

SEQ ID NO: 1284 - DNA, 921 bp, synthetic construct
  source 1..921: mol_type = other DNA; note = NLS-DCAF1-(GS)1-3DX.2 nucleic acid
ccggcggcgaaacgcgtgaaactggatggcagcggcagcggcagccaggcgccgattaactttaccagccgcctgaaccgccgcgcgagctttccgaaatatggcggcgtggatggcggctgctttgatcgccatctgatttttagccgcggcagcgatattgtgctgacccagagcccggcgagcctggcggtgagcctgggccagcgcgcgaccattagctgccgcgcgagcgaaagcgtggataactatggctttagctttatgaactggtttcagcagaaaccgggccagccgccgaaactgctgatttatgcgaccagcaaccgcggcagcggcgtgccggcgcgctttagcggcagcggcagcggcaccgattttagcctgaacattcatccggtggaagaagatgatagcgcgatgtatttttgccagcagaccaaagaagtgccgtggacctttggcggcggcaccaaactggaaattaaacgcggcggcggcggcagcggcggcggcgatagcggcggcggcggcagcgaagtgaaactggtggaaagcggcggcgatctggtgaaaccgggcggcagcctgaaactgagctgcgcggcgagcggctttacctttagccattatggcatgagctgggtgcgccagaccccggataaacgcctggaatgggtggcgaccattggcagccgcggcacctatacccattatccggatagcgtgaaaggccgctttaccattagccgcgataacgataaaaacgcgctgtatctgcagatgaacagcctgcgcaccgaagataccgcgatgtattattgcgcgcgcaaaagcgaattttattattatggcaacacctattattatagcgcgatggattattggggccagggcgcgagcgtgaccgtgagcagctaa

SEQ ID NO: 1285 - DNA, 927 bp, synthetic construct
  source 1..927: mol_type = other DNA; note = NLS-DCAF1-(GS)2-3DX.2 nucleic acid
ccggcggcgaaacgcgtgaaactggatggcagcggcagcggcagccaggcgccgattaactttaccagccgcctgaaccgccgcgcgagctttccgaaatatggcggcgtggatggcggctgctttgatcgccatctgatttttagccgcggcagcggcagcgatattgtgctgacccagagcccggcgagcctggcggtgagcctgggccagcgcgcgaccattagctgccgcgcgagcgaaagcgtggataactatggctttagctttatgaactggtttcagcagaaaccgggccagccgccgaaactgctgatttatgcgaccagcaaccgcggcagcggcgtgccggcgcgctttagcggcagcggcagcggcaccgattttagcctgaacattcatccggtggaagaagatgatagcgcgatgtatttttgccagcagaccaaagaagtgccgtggacctttggcggcggcaccaaactggaaattaaacgcggcggcggcggcagcggcggcggcgatagcggcggcggcggcagcgaagtgaaactggtggaaagcggcggcgatctggtgaaaccgggcggcagcctgaaactgagctgcgcggcgagcggctttacctttagccattatggcatgagctgggtgcgccagaccccggataaacgcctggaatgggtggcgaccattggcagccgcggcacctatacccattatccggatagcgtgaaaggccgctttaccattagccgcgataacgataaaaacgcgctgtatctgcagatgaacagcctgcgcaccgaagataccgcgatgtattattgcgcgcgcaaaagcgaattttattattatggcaacacctattattatagcgcgatggattattggggccagggcgcgagcgtgaccgtgagcagctaa

SEQ ID NO: 1286 - DNA, 933 bp, synthetic construct
  source 1..933: mol_type = other DNA; note = NLS-DCAF1-(GS)3-3DX.2 nucleic acid
ccggcggcgaaacgcgtgaaactggatggcagcggcagcggcagccaggcgccgattaactttaccagccgcctgaaccgccgcgcgagctttccgaaatatggcggcgtggatggcggctgctttgatcgccatctgatttttagccgcggcagcggcagcggcagcgatattgtgctgacccagagcccggcgagcctggcggtgagcctgggccagcgcgcgaccattagctgccgcgcgagcgaaagcgtggataactatggctttagctttatgaactggtttcagcagaaaccgggccagccgccgaaactgctgatttatgcgaccagcaaccgcggcagcggcgtgccggcgcgctttagcggcagcggcagcggcaccgattttagcctgaacattcatccggtggaagaagatgatagcgcgatgtatttttgccagcagaccaaagaagtgccgtggacctttggcggcggcaccaaactggaaattaaacgcggcggcggcggcagcggcggcggcgatagcggcggcggcggcagcgaagtgaaactggtggaaagcggcggcgatctggtgaaaccgggcggcagcctgaaactgagctgcgcggcgagcggctttacctttagccattatggcatgagctgggtgcgccagaccccggataaacgcctggaatgggtggcgaccattggcagccgcggcacctatacccattatccggatagcgtgaaaggccgctttaccattagccgcgataacgataaaaacgcgctgtatctgcagatgaacagcctgcgcaccgaagataccgcgatgtattattgcgcgcgcaaaagcgaattttattattatggcaacacctattattatagcgcgatggattattggggccagggcgcgagcgtgaccgtgagcagctaa

SEQ ID NO: 1287 - DNA, 939 bp, synthetic construct
  source 1..939: mol_type = other DNA; note = NLS-DCAF1-(GS)4-3DX.2 nucleic acid
ccggcggcgaaacgcgtgaaactggatggcagcggcagcggcagccaggcgccgattaactttaccagccgcctgaaccgccgcgcgagctttccgaaatatggcggcgtggatggcggctgctttgatcgccatctgatttttagccgcggcagcggcagcggcagcggcagcgatattgtgctgacccagagcccggcgagcctggcggtgagcctgggccagcgcgcgaccattagctgccgcgcgagcgaaagcgtggataactatggctttagctttatgaactggtttcagcagaaaccgggccagccgccgaaactgctgatttatgcgaccagcaaccgcggcagcggcgtgccggcgcgctttagcggcagcggcagcggcaccgattttagcctgaacattcatccggtggaagaagatgatagcgcgatgtatttttgccagcagaccaaagaagtgccgtggacctttggcggcggcaccaaactggaaattaaacgcggcggcggcggcagcggcggcggcgatagcggcggcggcggcagcgaagtgaaactggtggaaagcggcggcgatctggtgaaaccgggcggcagcctgaaactgagctgcgcggcgagcggctttacctttagccattatggcatgagctgggtgcgccagaccccggataaacgcctggaatgggtggcgaccattggcagccgcggcacctatacccattatccggatagcgtgaaaggccgctttaccattagccgcgataacgataaaaacgcgctgtatctgcagatgaacagcctgcgcaccgaagataccgcgatgtattattgcgcgcgcaaaagcgaattttattattatggcaacacctattattatagcgcgatggattattggggccagggcgcgagcgtgaccgtgagcagctaa

SEQ ID NO: 1288 - DNA, 945 bp, synthetic construct
  source 1..945: mol_type = other DNA; note = NLS-DCAF1-(GS)5-3DX.2 nucleic acid
ccggcggcgaaacgcgtgaaactggatggcagcggcagcggcagccaggcgccgattaactttaccagccgcctgaaccgccgcgcgagctttccgaaatatggcggcgtggatggcggctgctttgatcgccatctgatttttagccgcggcagcggcagcggcagcggcagcggcagcgatattgtgctgacccagagcccggcgagcctggcggtgagcctgggccagcgcgcgaccattagctgccgcgcgagcgaaagcgtggataactatggctttagctttatgaactggtttcagcagaaaccgggccagccgccgaaactgctgatttatgcgaccagcaaccgcggcagcggcgtgccggcgcgctttagcggcagcggcagcggcaccgattttagcctgaacattcatccggtggaagaagatgatagcgcgatgtatttttgccagcagaccaaagaagtgccgtggacctttggcggcggcaccaaactggaaattaaacgcggcggcggcggcagcggcggcggcgatagcggcggcggcggcagcgaagtgaaactggtggaaagcggcggcgatctggtgaaaccgggcggcagcctgaaactgagctgcgcggcgagcggctttacctttagccattatggcatgagctgggtgcgccagaccccggataaacgcctggaatgggtggcgaccattggcagccgcggcacctatacccattatccggatagcgtgaaaggccgctttaccattagccgcgataacgataaaaacgcgctgtatctgcagatgaacagcctgcgcaccgaagataccgcgatgtattattgcgcgcgcaaaagcgaattttattattatggcaacacctattattatagcgcgatggattattggggccagggcgcgagcgtgaccgtgagcagctaa

SEQ ID NO: 1289 - DNA, 951 bp, synthetic construct
  source 1..951: mol_type = other DNA; note = NLS-DCAF1-(GS)6-3DX.2 nucleic acid
ccggcggcgaaacgcgtgaaactggatggcagcggcagcggcagccaggcgccgattaactttaccagccgcctgaaccgccgcgcgagctttccgaaatatggcggcgtggatggcggctgctttgatcgccatctgatttttagccgcggcagcggcagcggcagcggcagcggcagcggcagcgatattgtgctgacccagagcccggcgagcctggcggtgagcctgggccagcgcgcgaccattagctgccgcgcgagcgaaagcgtggataactatggctttagctttatgaactggtttcagcagaaaccgggccagccgccgaaactgctgatttatgcgaccagcaaccgcggcagcggcgtgccggcgcgctttagcggcagcggcagcggcaccgattttagcctgaacattcatccggtggaagaagatgatagcgcgatgtatttttgccagcagaccaaagaagtgccgtggacctttggcggcggcaccaaactggaaattaaacgcggcggcggcggcagcggcggcggcgatagcggcggcggcggcagcgaagtgaaactggtggaaagcggcggcgatctggtgaaaccgggcggcagcctgaaactgagctgcgcggcgagcggctttacctttagccattatggcatgagctgggtgcgccagaccccggataaacgcctggaatgggtggcgaccattggcagccgcggcacctatacccattatccggatagcgtgaaaggccgctttaccattagccgcgataacgataaaaacgcgctgtatctgcagatgaacagcctgcgcaccgaagataccgcgatgtattattgcgcgcgcaaaagcgaattttattattatggcaacacctattattatagcgcgatggattattggggccagggcgcgagcgtgaccgtgagcagctaa

SEQ ID NO: 1290 - DNA, 951 bp, synthetic construct
  source 1..951: mol_type = other DNA; note = HA-NLS-DCAF1-(GS)1-3DX.2 nucleic acid
atgtacccatacgatgttccagattacgctccggcggcgaaacgcgtgaaactggatggcagcggcagcggcagccaggcgccgattaactttaccagccgcctgaaccgccgcgcgagctttccgaaatatggcggcgtggatggcggctgctttgatcgccatctgatttttagccgcggcagcgatattgtgctgacccagagcccggcgagcctggcggtgagcctgggccagcgcgcgaccattagctgccgcgcgagcgaaagcgtggataactatggctttagctttatgaactggtttcagcagaaaccgggccagccgccgaaactgctgatttatgcgaccagcaaccgcggcagcggcgtgccggcgcgctttagcggcagcggcagcggcaccgattttagcctgaacattcatccggtggaagaagatgatagcgcgatgtatttttgccagcagaccaaagaagtgccgtggacctttggcggcggcaccaaactggaaattaaacgcggcggcggcggcagcggcggcggcgatagcggcggcggcggcagcgaagtgaaactggtggaaagcggcggcgatctggtgaaaccgggcggcagcctgaaactgagctgcgcggcgagcggctttacctttagccattatggcatgagctgggtgcgccagaccccggataaacgcctggaatgggtggcgaccattggcagccgcggcacctatacccattatccggatagcgtgaaaggccgctttaccattagccgcgataacgataaaaacgcgctgtatctgcagatgaacagcctgcgcaccgaagataccgcgatgtattattgcgcgcgcaaaagcgaattttattattatggcaacacctattattatagcgcgatggattattggggccagggcgcgagcgtgaccgtgagcagctaa

SEQ ID NO: 1291 - DNA, 957 bp, synthetic construct
  source 1..957: mol_type = other DNA; note = HA-NLS-DCAF1-(GS)2-3DX.2 nucleic acid
atgtacccatacgatgttccagattacgctccggcggcgaaacgcgtgaaactggatggcagcggcagcggcagccaggcgccgattaactttaccagccgcctgaaccgccgcgcgagctttccgaaatatggcggcgtggatggcggctgctttgatcgccatctgatttttagccgcggcagcggcagcgatattgtgctgacccagagcccggcgagcctggcggtgagcctgggccagcgcgcgaccattagctgccgcgcgagcgaaagcgtggataactatggctttagctttatgaactggtttcagcagaaaccgggccagccgccgaaactgctgatttatgcgaccagcaaccgcggcagcggcgtgccggcgcgctttagcggcagcggcagcggcaccgattttagcctgaacattcatccggtggaagaagatgatagcgcgatgtatttttgccagcagaccaaagaagtgccgtggacctttggcggcggcaccaaactggaaattaaacgcggcggcggcggcagcggcggcggcgatagcggcggcggcggcagcgaagtgaaactggtggaaagcggcggcgatctggtgaaaccgggcggcagcctgaaactgagctgcgcggcgagcggctttacctttagccattatggcatgagctgggtgcgccagaccccggataaacgcctggaatgggtggcgaccattggcagccgcggcacctatacccattatccggatagcgtgaaaggccgctttaccattagccgcgataacgataaaaacgcgctgtatctgcagatgaacagcctgcgcaccgaagataccgcgatgtattattgcgcgcgcaaaagcgaattttattattatggcaacacctattattatagcgcgatggattattggggccagggcgcgagcgtgaccgtgagcagctaa

SEQ ID NO: 1292 - DNA, 963 bp, synthetic construct
  source 1..963: mol_type = other DNA; note = HA-NLS-DCAF1-(GS)3-3DX.2 nucleic acid
atgtacccatacgatgttccagattacgctccggcggcgaaacgcgtgaaactggatggcagcggcagcggcagccaggcgccgattaactttaccagccgcctgaaccgccgcgcgagctttccgaaatatggcggcgtggatggcggctgctttgatcgccatctgatttttagccgcggcagcggcagcggcagcgatattgtgctgacccagagcccggcgagcctggcggtgagcctgggccagcgcgcgaccattagctgccgcgcgagcgaaagcgtggataactatggctttagctttatgaactggtttcagcagaaaccgggccagccgccgaaactgctgatttatgcgaccagcaaccgcggcagcggcgtgccggcgcgctttagcggcagcggcagcggcaccgattttagcctgaacattcatccggtggaagaagatgatagcgcgatgtatttttgccagcagaccaaagaagtgccgtggacctttggcggcggcaccaaactggaaattaaacgcggcggcggcggcagcggcggcggcgatagcggcggcggcggcagcgaagtgaaactggtggaaagcggcggcgatctggtgaaaccgggcggcagcctgaaactgagctgcgcggcgagcggctttacctttagccattatggcatgagctgggtgcgccagaccccggataaacgcctggaatgggtggcgaccattggcagccgcggcacctatacccattatccggatagcgtgaaaggccgctttaccattagccgcgataacgataaaaacgcgctgtatctgcagatgaacagcctgcgcaccgaagataccgcgatgtattattgcgcgcgcaaaagcgaattttattattatggcaacacctattattatagcgcgatggattattggggccagggcgcgagcgtgaccgtgagcagctaa

SEQ ID NO: 1293 - DNA, 969 bp, synthetic construct
  source 1..969: mol_type = other DNA; note = HA-NLS-DCAF1-(GS)4-3DX.2 nucleic acid
atgtacccatacgatgttccagattacgctccggcggcgaaacgcgtgaaactggatggcagcggcagcggcagccaggcgccgattaactttaccagccgcctgaaccgccgcgcgagctttccgaaatatggcggcgtggatggcggctgctttgatcgccatctgatttttagccgcggcagcggcagcggcagcggcagcgatattgtgctgacccagagcccggcgagcctggcggtgagcctgggccagcgcgcgaccattagctgccgcgcgagcgaaagcgtggataactatggctttagctttatgaactggtttcagcagaaaccgggccagccgccgaaactgctgatttatgcgaccagcaaccgcggcagcggcgtgccggcgcgctttagcggcagcggcagcggcaccgattttagcctgaacattcatccggtggaagaagatgatagcgcgatgtatttttgccagcagaccaaagaagtgccgtggacctttggcggcggcaccaaactggaaattaaacgcggcggcggcggcagcggcggcggcgatagcggcggcggcggcagcgaagtgaaactggtggaaagcggcggcgatctggtgaaaccgggcggcagcctgaaactgagctgcgcggcgagcggctttacctttagccattatggcatgagctgggtgcgccagaccccggataaacgcctggaatgggtggcgaccattggcagccgcggcacctatacccattatccggatagcgtgaaaggccgctttaccattagccgcgataacgataaaaacgcgctgtatctgcagatgaacagcctgcgcaccgaagataccgcgatgtattattgcgcgcgcaaaagcgaattttattattatggcaacacctattattatagcgcgatggattattggggccagggcgcgagcgtgaccgtgagcagctaa

SEQ ID NO: 1294 - DNA, 975 bp, synthetic construct
  source 1..975: mol_type = other DNA; note = HA-NLS-DCAF1-(GS)5-3DX.2 nucleic acid
atgtacccatacgatgttccagattacgctccggcggcgaaacgcgtgaaactggatggcagcggcagcggcagccaggcgccgattaactttaccagccgcctgaaccgccgcgcgagctttccgaaatatggcggcgtggatggcggctgctttgatcgccatctgatttttagccgcggcagcggcagcggcagcggcagcggcagcgatattgtgctgacccagagcccggcgagcctggcggtgagcctgggccagcgcgcgaccattagctgccgcgcgagcgaaagcgtggataactatggctttagctttatgaactggtttcagcagaaaccgggccagccgccgaaactgctgatttatgcgaccagcaaccgcggcagcggcgtgccggcgcgctttagcggcagcggcagcggcaccgattttagcctgaacattcatccggtggaagaagatgatagcgcgatgtatttttgccagcagaccaaagaagtgccgtggacctttggcggcggcaccaaactggaaattaaacgcggcggcggcggcagcggcggcggcgatagcggcggcggcggcagcgaagtgaaactggtggaaagcggcggcgatctggtgaaaccgggcggcagcctgaaactgagctgcgcggcgagcggctttacctttagccattatggcatgagctgggtgcgccagaccccggataaacgcctggaatgggtggcgaccattggcagccgcggcacctatacccattatccggatagcgtgaaaggccgctttaccattagccgcgataacgataaaaacgcgctgtatctgcagatgaacagcctgcgcaccgaagataccgcgatgtattattgcgcgcgcaaaagcgaattttattattatggcaacacctattattatagcgcgatggattattggggccagggcgcgagcgtgaccgtgagcagctaa

SEQ ID NO: 1295 - DNA, 981 bp, synthetic construct
  source 1..981: mol_type = other DNA; note = HA-NLS-DCAF1-(GS)6-3DX.2 nucleic acid
atgtacccatacgatgttccagattacgctccggcggcgaaacgcgtgaaactggatggcagcggcagcggcagccaggcgccgattaactttaccagccgcctgaaccgccgcgcgagctttccgaaatatggcggcgtggatggcggctgctttgatcgccatctgatttttagccgcggcagcggcagcggcagcggcagcggcagcggcagcgatattgtgctgacccagagcccggcgagcctggcggtgagcctgggccagcgcgcgaccattagctgccgcgcgagcgaaagcgtggataactatggctttagctttatgaactggtttcagcagaaaccgggccagccgccgaaactgctgatttatgcgaccagcaaccgcggcagcggcgtgccggcgcgctttagcggcagcggcagcggcaccgattttagcctgaacattcatccggtggaagaagatgatagcgcgatgtatttttgccagcagaccaaagaagtgccgtggacctttggcggcggcaccaaactggaaattaaacgcggcggcggcggcagcggcggcggcgatagcggcggcggcggcagcgaagtgaaactggtggaaagcggcggcgatctggtgaaaccgggcggcagcctgaaactgagctgcgcggcgagcggctttacctttagccattatggcatgagctgggtgcgccagaccccggataaacgcctggaatgggtggcgaccattggcagccgcggcacctatacccattatccggatagcgtgaaaggccgctttaccattagccgcgataacgataaaaacgcgctgtatctgcagatgaacagcctgcgcaccgaagataccgcgatgtattattgcgcgcgcaaaagcgaattttattattatggcaacacctattattatagcgcgatggattattggggccagggcgcgagcgtgaccgtgagcagctaa

SEQ ID NO: 1296 - DNA, 1884 bp, synthetic construct
  source 1..1884: mol_type = other DNA; note = NLS-3DX.2-(GS)1-E6AP nucleic acid
ccggcggcgaaacgcgtgaaactggatggcagcggcagcggcagcgatattgtgctgacccagagcccggcgagcctggcggtgagcctgggccagcgcgcgaccattagctgccgcgcgagcgaaagcgtggataactatggctttagctttatgaactggtttcagcagaaaccgggccagccgccgaaactgctgatttatgcgaccagcaaccgcggcagcggcgtgccggcgcgctttagcggcagcggcagcggcaccgattttagcctgaacattcatccggtggaagaagatgatagcgcgatgtatttttgccagcagaccaaagaagtgccgtggacctttggcggcggcaccaaactggaaattaaacgcggcggcggcggcagcggcggcggcgatagcggcggcggcggcagcgaagtgaaactggtggaaagcggcggcgatctggtgaaaccgggcggcagcctgaaactgagctgcgcggcgagcggctttacctttagccattatggcatgagctgggtgcgccagaccccggataaacgcctggaatgggtggcgaccattggcagccgcggcacctatacccattatccggatagcgtgaaaggccgctttaccattagccgcgataacgataaaaacgcgctgtatctgcagatgaacagcctgcgcaccgaagataccgcgatgtattattgcgcgcgcaaaagcgaattttattattatggcaacacctattattatagcgcgatggattattggggccagggcgcgagcgtgaccgtgagcagcggcagcaatccatatttgagactcaaagttagacgtgaccatatcatagatgatgcacttgtccggctagagatgatcgctatggaaaatcctgcagacttgaagaagcagttgtatgtggaatttgaaggagaacaaggagttgatgagggaggtgtttccaaagaattttttcagctggttgtggaggaaatcttcaatccagatattggtatgttcacatacgatgaatctacaaaattgttttggtttaatccatcttcttttgaaactgagggtcagtttactctgattggcatagtactgggtctggctatttacaataactgtatactggatgtacattttcccatggttgtctacaggaagctaatggggaaaaaaggaacttttcgtgacttgggagactctcacccagttctatatcagagtttaaaagatttattggagtatgaagggaatgtggaagatgacatgatgatcactttccagatatcacagacagatctttttggtaacccaatgatgtatgatctaaaggaaaatggtgataaaattccaattacaaatgaaaacaggaaggaatttgtcaatctttattctgactacattctcaataaatcagtagaaaaacagttcaaggcttttcggagaggttttcatatggtgaccaatgaatctcccttaaagtacttattcagaccagaagaaattgaattgcttatatgtggaagccggaatctagatttccaagcactagaagaaactacagaatatgacggtggctataccagggactctgttctgattagggagttctgggaaatcgttcattcatttacagatgaacagaaaagactcttcttgcagtttacaacgggcacagacagagcacctgtgggaggactaggaaaattaaagatgattatagccaaaaatggcccagacacagaaaggttacctacatctcatacttgctttaatgtgcttttacttccggaatactcaagcaaagaaaaacttaaagagagattgttgaaggccatcacgtatgccaaaggatttggcatgctgtaa

SEQ ID NO: 1297 - DNA, 1890 bp, synthetic construct
  source 1..1890: mol_type = other DNA; note = NLS-3DX.2-(GS)2-E6AP nucleic acid
ccggcggcgaaacgcgtgaaactggatggcagcggcagcggcagcgatattgtgctgacccagagcccggcgagcctggcggtgagcctgggccagcgcgcgaccattagctgccgcgcgagcgaaagcgtggataactatggctttagctttatgaactggtttcagcagaaaccgggccagccgccgaaactgctgatttatgcgaccagcaaccgcggcagcggcgtgccggcgcgctttagcggcagcggcagcggcaccgattttagcctgaacattcatccggtggaagaagatgatagcgcgatgtatttttgccagcagaccaaagaagtgccgtggacctttggcggcggcaccaaactggaaattaaacgcggcggcggcggcagcggcggcggcgatagcggcggcggcggcagcgaagtgaaactggtggaaagcggcggcgatctggtgaaaccgggcggcagcctgaaactgagctgcgcggcgagcggctttacctttagccattatggcatgagctgggtgcgccagaccccggataaacgcctggaatgggtggcgaccattggcagccgcggcacctatacccattatccggatagcgtgaaaggccgctttaccattagccgcgataacgataaaaacgcgctgtatctgcagatgaacagcctgcgcaccgaagataccgcgatgtattattgcgcgcgcaaaagcgaattttattattatggcaacacctattattatagcgcgatggattattggggccagggcgcgagcgtgaccgtgagcagcggcagcggcagcaatccatatttgagactcaaagttagacgtgaccatatcatagatgatgcacttgtccggctagagatgatcgctatggaaaatcctgcagacttgaagaagcagttgtatgtggaatttgaaggagaacaaggagttgatgagggaggtgtttccaaagaattttttcagctggttgtggaggaaatcttcaatccagatattggtatgttcacatacgatgaatctacaaaattgttttggtttaatccatcttcttttgaaactgagggtcagtttactctgattggcatagtactgggtctggctatttacaataactgtatactggatgtacattttcccatggttgtctacaggaagctaatggggaaaaaaggaacttttcgtgacttgggagactctcacccagttctatatcagagtttaaaagatttattggagtatgaagggaatgtggaagatgacatgatgatcactttccagatatcacagacagatctttttggtaacccaatgatgtatgatctaaaggaaaatggtgataaaattccaattacaaatgaaaacaggaaggaatttgtcaatctttattctgactacattctcaataaatcagtagaaaaacagttcaaggcttttcggagaggttttcatatggtgaccaatgaatctcccttaaagtacttattcagaccagaagaaattgaattgcttatatgtggaagccggaatctagatttccaagcactagaagaaactacagaatatgacggtggctataccagggactctgttctgattagggagttctgggaaatcgttcattcatttacagatgaacagaaaagactcttcttgcagtttacaacgggcacagacagagcacctgtgggaggactaggaaaattaaagatgattatagccaaaaatggcccagacacagaaaggttacctacatctcatacttgctttaatgtgcttttacttccggaatactcaagcaaagaaaaacttaaagagagattgttgaaggccatcacgtatgccaaaggatttggcatgctgtaa

SEQ ID NO: 1298 - DNA, 1896 bp, synthetic construct
  source 1..1896: mol_type = other DNA; note = NLS-3DX.2-(GS)3-E6AP nucleic acid
ccggcggcgaaacgcgtgaaactggatggcagcggcagcggcagcgatattgtgctgacccagagcccggcgagcctggcggtgagcctgggccagcgcgcgaccattagctgccgcgcgagcgaaagcgtggataactatggctttagctttatgaactggtttcagcagaaaccgggccagccgccgaaactgctgatttatgcgaccagcaaccgcggcagcggcgtgccggcgcgctttagcggcagcggcagcggcaccgattttagcctgaacattcatccggtggaagaagatgatagcgcgatgtatttttgccagcagaccaaagaagtgccgtggacctttggcggcggcaccaaactggaaattaaacgcggcggcggcggcagcggcggcggcgatagcggcggcggcggcagcgaagtgaaactggtggaaagcggcggcgatctggtgaaaccgggcggcagcctgaaactgagctgcgcggcgagcggctttacctttagccattatggcatgagctgggtgcgccagaccccggataaacgcctggaatgggtggcgaccattggcagccgcggcacctatacccattatccggatagcgtgaaaggccgctttaccattagccgcgataacgataaaaacgcgctgtatctgcagatgaacagcctgcgcaccgaagataccgcgatgtattattgcgcgcgcaaaagcgaattttattattatggcaacacctattattatagcgcgatggattattggggccagggcgcgagcgtgaccgtgagcagcggcagcggcagcggcagcaatccatatttgagactcaaagttagacgtgaccatatcatagatgatgcacttgtccggctagagatgatcgctatggaaaatcctgcagacttgaagaagcagttgtatgtggaatttgaaggagaacaaggagttgatgagggaggtgtttccaaagaattttttcagctggttgtggaggaaatcttcaatccagatattggtatgttcacatacgatgaatctacaaaattgttttggtttaatccatcttcttttgaaactgagggtcagtttactctgattggcatagtactgggtctggctatttacaataactgtatactggatgtacattttcccatggttgtctacaggaagctaatggggaaaaaaggaacttttcgtgacttgggagactctcacccagttctatatcagagtttaaaagatttattggagtatgaagggaatgtggaagatgacatgatgatcactttccagatatcacagacagatctttttggtaacccaatgatgtatgatctaaaggaaaatggtgataaaattccaattacaaatgaaaacaggaaggaatttgtcaatctttattctgactacattctcaataaatcagtagaaaaacagttcaaggcttttcggagaggttttcatatggtgaccaatgaatctcccttaaagtacttattcagaccagaagaaattgaattgcttatatgtggaagccggaatctagatttccaagcactagaagaaactacagaatatgacggtggctataccagggactctgttctgattagggagttctgggaaatcgttcattcatttacagatgaacagaaaagactcttcttgcagtttacaacgggcacagacagagcacctgtgggaggactaggaaaattaaagatgattatagccaaaaatggcccagacacagaaaggttacctacatctcatacttgctttaatgtgcttttacttccggaatactcaagcaaagaaaaacttaaagagagattgttgaaggccatcacgtatgccaaaggatttggcatgctgtaa

SEQ ID NO: 1299 - DNA, 1902 bp, synthetic construct
  source 1..1902: mol_type = other DNA; note = NLS-3DX.2-(GS)4-E6AP nucleic acid
ccggcggcgaaacgcgtgaaactggatggcagcggcagcggcagcgatattgtgctgacccagagcccggcgagcctggcggtgagcctgggccagcgcgcgaccattagctgccgcgcgagcgaaagcgtggataactatggctttagctttatgaactggtttcagcagaaaccgggccagccgccgaaactgctgatttatgcgaccagcaaccgcggcagcggcgtgccggcgcgctttagcggcagcggcagcggcaccgattttagcctgaacattcatccggtggaagaagatgatagcgcgatgtatttttgccagcagaccaaagaagtgccgtggacctttggcggcggcaccaaactggaaattaaacgcggcggcggcggcagcggcggcggcgatagcggcggcggcggcagcgaagtgaaactggtggaaagcggcggcgatctggtgaaaccgggcggcagcctgaaactgagctgcgcggcgagcggctttacctttagccattatggcatgagctgggtgcgccagaccccggataaacgcctggaatgggtggcgaccattggcagccgcggcacctatacccattatccggatagcgtgaaaggccgctttaccattagccgcgataacgataaaaacgcgctgtatctgcagatgaacagcctgcgcaccgaagataccgcgatgtattattgcgcgcgcaaaagcgaattttattattatggcaacacctattattatagcgcgatggattattggggccagggcgcgagcgtgaccgtgagcagcggcagcggcagcggcagcggcagcaatccatatttgagactcaaagttagacgtgaccatatcatagatgatgcacttgtccggctagagatgatcgctatggaaaatcctgcagacttgaagaagcagttgtatgtggaatttgaaggagaacaaggagttgatgagggaggtgtttccaaagaattttttcagctggttgtggaggaaatcttcaatccagatattggtatgttcacatacgatgaatctacaaaattgttttggtttaatccatcttcttttgaaactgagggtcagtttactctgattggcatagtactgggtctggctatttacaataactgtatactggatgtacattttcccatggttgtctacaggaagctaatggggaaaaaaggaacttttcgtgacttgggagactctcacccagttctatatcagagtttaaaagatttattggagtatgaagggaatgtggaagatgacatgatgatcactttccagatatcacagacagatctttttggtaacccaatgatgtatgatctaaaggaaaatggtgataaaattccaattacaaatgaaaacaggaaggaatttgtcaatctttattctgactacattctcaataaatcagtagaaaaacagttcaaggcttttcggagaggttttcatatggtgaccaatgaatctcccttaaagtacttattcagaccagaagaaattgaattgcttatatgtggaagccggaatctagatttccaagcactagaagaaactacagaatatgacggtggctataccagggactctgttctgattagggagttctgggaaatcgttcattcatttacagatgaacagaaaagactcttcttgcagtttacaacgggcacagacagagcacctgtgggaggactaggaaaattaaagatgattatagccaaaaatggcccagacacagaaaggttacctacatctcatacttgctttaatgtgcttttacttccggaatactcaagcaaagaaaaacttaaagagagattgttgaaggccatcacgtatgccaaaggatttggcatgctgtaa

SEQ ID NO: 1300 - DNA, 1908 bp, synthetic construct
  source 1..1908: mol_type = other DNA; note = NLS-3DX.2-(GS)5-E6AP nucleic acid
ccggcggcgaaacgcgtgaaactggatggcagcggcagcggcagcgatattgtgctgacccagagcccggcgagcctggcggtgagcctgggccagcgcgcgaccattagctgccgcgcgagcgaaagcgtggataactatggctttagctttatgaactggtttcagcagaaaccgggccagccgccgaaactgctgatttatgcgaccagcaaccgcggcagcggcgtgccggcgcgctttagcggcagcggcagcggcaccgattttagcctgaacattcatccggtggaagaagatgatagcgcgatgtatttttgccagcagaccaaagaagtgccgtggacctttggcggcggcaccaaactggaaattaaacgcggcggcggcggcagcggcggcggcgatagcggcggcggcggcagcgaagtgaaactggtggaaagcggcggcgatctggtgaaaccgggcggcagcctgaaactgagctgcgcggcgagcggctttacctttagccattatggcatgagctgggtgcgccagaccccggataaacgcctggaatgggtggcgaccattggcagccgcggcacctatacccattatccggatagcgtgaaaggccgctttaccattagccgcgataacgataaaaacgcgctgtatctgcagatgaacagcctgcgcaccgaagataccgcgatgtattattgcgcgcgcaaaagcgaattttattattatggcaacacctattattatagcgcgatggattattggggccagggcgcgagcgtgaccgtgagcagcggcagcggcagcggcagcggcagcggcagcaatccatatttgagactcaaagttagacgtgaccatatcatagatgatgcacttgtccggctagagatgatcgctatggaaaatcctgcagacttgaagaagcagttgtatgtggaatttgaaggagaacaaggagttgatgagggaggtgtttccaaagaattttttcagctggttgtggaggaaatcttcaatccagatattggtatgttcacatacgatgaatctacaaaattgttttggtttaatccatcttcttttgaaactgagggtcagtttactctgattggcatagtactgggtctggctatttacaataactgtatactggatgtacattttcccatggttgtctacaggaagctaatggggaaaaaaggaacttttcgtgacttgggagactctcacccagttctatatcagagtttaaaagatttattggagtatgaagggaatgtggaagatgacatgatgatcactttccagatatcacagacagatctttttggtaacccaatgatgtatgatctaaaggaaaatggtgataaaattccaattacaaatgaaaacaggaaggaatttgtcaatctttattctgactacattctcaataaatcagtagaaaaacagttcaaggcttttcggagaggttttcatatggtgaccaatgaatctcccttaaagtacttattcagaccagaagaaattgaattgcttatatgtggaagccggaatctagatttccaagcactagaagaaactacagaatatgacggtggctataccagggactctgttctgattagggagttctgggaaatcgttcattcatttacagatgaacagaaaagactcttcttgcagtttacaacgggcacagacagagcacctgtgggaggactaggaaaattaaagatgattatagccaaaaatggcccagacacagaaaggttacctacatctcatacttgctttaatgtgcttttacttccggaatactcaagcaaagaaaaacttaaagagagattgttgaaggccatcacgtatgccaaaggatttggcatgctgtaa

SEQ ID NO: 1301 - DNA, 1914 bp, synthetic construct
  source 1..1914: mol_type = other DNA; note = NLS-3DX.2-(GS)6-E6AP nucleic acid
ccggcggcgaaacgcgtgaaactggatggcagcggcagcggcagcgatattgtgctgacccagagcccggcgagcctggcggtgagcctgggccagcgcgcgaccattagctgccgcgcgagcgaaagcgtggataactatggctttagctttatgaactggtttcagcagaaaccgggccagccgccgaaactgctgatttatgcgaccagcaaccgcggcagcggcgtgccggcgcgctttagcggcagcggcagcggcaccgattttagcctgaacattcatccggtggaagaagatgatagcgcgatgtatttttgccagcagaccaaagaagtgccgtggacctttggcggcggcaccaaactggaaattaaacgcggcggcggcggcagcggcggcggcgatagcggcggcggcggcagcgaagtgaaactggtggaaagcggcggcgatctggtgaaaccgggcggcagcctgaaactgagctgcgcggcgagcggctttacctttagccattatggcatgagctgggtgcgccagaccccggataaacgcctggaatgggtggcgaccattggcagccgcggcacctatacccattatccggatagcgtgaaaggccgctttaccattagccgcgataacgataaaaacgcgctgtatctgcagatgaacagcctgcgcaccgaagataccgcgatgtattattgcgcgcgcaaaagcgaattttattattatggcaacacctattattatagcgcgatggattattggggccagggcgcgagcgtgaccgtgagcagcggcagcggcagcggcagcggcagcggcagcggcagcaatccatatttgagactcaaagttagacgtgaccatatcatagatgatgcacttgtccggctagagatgatcgctatggaaaatcctgcagacttgaagaagcagttgtatgtggaatttgaaggagaacaaggagttgatgagggaggtgtttccaaagaattttttcagctggttgtggaggaaatcttcaatccagatattggtatgttcacatacgatgaatctacaaaattgttttggtttaatccatcttcttttgaaactgagggtcagtttactctgattggcatagtactgggtctggctatttacaataactgtatactggatgtacattttcccatggttgtctacaggaagctaatggggaaaaaaggaacttttcgtgacttgggagactctcacccagttctatatcagagtttaaaagatttattggagtatgaagggaatgtggaagatgacatgatgatcactttccagatatcacagacagatctttttggtaacccaatgatgtatgatctaaaggaaaatggtgataaaattccaattacaaatgaaaacaggaaggaatttgtcaatctttattctgactacattctcaataaatcagtagaaaaacagttcaaggcttttcggagaggttttcatatggtgaccaatgaatctcccttaaagtacttattcagaccagaagaaattgaattgcttatatgtggaagccggaatctagatttccaagcactagaagaaactacagaatatgacggtggctataccagggactctgttctgattagggagttctgggaaatcgttcattcatttacagatgaacagaaaagactcttcttgcagtttacaacgggcacagacagagcacctgtgggaggactaggaaaattaaagatgattatagccaaaaatggcccagacacagaaaggttacctacatctcatacttgctttaatgtgcttttacttccggaatactcaagcaaagaaaaacttaaagagagattgttgaaggccatcacgtatgccaaaggatttggcatgctgtaa

SEQ ID NO: 1302 - DNA, 1914 bp, synthetic construct
  source 1..1914: mol_type = other DNA; note = HA-NLS-3DX.2-(GS)1-E6AP nucleic acid
atgtacccatacgatgttccagattacgctccggcggcgaaacgcgtgaaactggatggcagcggcagcggcagcgatattgtgctgacccagagcccggcgagcctggcggtgagcctgggccagcgcgcgaccattagctgccgcgcgagcgaaagcgtggataactatggctttagctttatgaactggtttcagcagaaaccgggccagccgccgaaactgctgatttatgcgaccagcaaccgcggcagcggcgtgccggcgcgctttagcggcagcggcagcggcaccgattttagcctgaacattcatccggtggaagaagatgatagcgcgatgtatttttgccagcagaccaaagaagtgccgtggacctttggcggcggcaccaaactggaaattaaacgcggcggcggcggcagcggcggcggcgatagcggcggcggcggcagcgaagtgaaactggtggaaagcggcggcgatctggtgaaaccgggcggcagcctgaaactgagctgcgcggcgagcggctttacctttagccattatggcatgagctgggtgcgccagaccccggataaacgcctggaatgggtggcgaccattggcagccgcggcacctatacccattatccggatagcgtgaaaggccgctttaccattagccgcgataacgataaaaacgcgctgtatctgcagatgaacagcctgcgcaccgaagataccgcgatgtattattgcgcgcgcaaaagcgaattttattattatggcaacacctattattatagcgcgatggattattggggccagggcgcgagcgtgaccgtgagcagcggcagcaatccatatttgagactcaaagttagacgtgaccatatcatagatgatgcacttgtccggctagagatgatcgctatggaaaatcctgcagacttgaagaagcagttgtatgtggaatttgaaggagaacaaggagttgatgagggaggtgtttccaaagaattttttcagctggttgtggaggaaatcttcaatccagatattggtatgttcacatacgatgaatctacaaaattgttttggtttaatccatcttcttttgaaactgagggtcagtttactctgattggcatagtactgggtctggctatttacaataactgtatactggatgtacattttcccatggttgtctacaggaagctaatggggaaaaaaggaacttttcgtgacttgggagactctcacccagttctatatcagagtttaaaagatttattggagtatgaagggaatgtggaagatgacatgatgatcactttccagatatcacagacagatctttttggtaacccaatgatgtatgatctaaaggaaaatggtgataaaattccaattacaaatgaaaacaggaaggaatttgtcaatctttattctgactacattctcaataaatcagtagaaaaacagttcaaggcttttcggagaggttttcatatggtgaccaatgaatctcccttaaagtacttattcagaccagaagaaattgaattgcttatatgtggaagccggaatctagatttccaagcactagaagaaactacagaatatgacggtggctataccagggactctgttctgattagggagttctgggaaatcgttcattcatttacagatgaacagaaaagactcttcttgcagtttacaacgggcacagacagagcacctgtgggaggactaggaaaattaaagatgattatagccaaaaatggcccagacacagaaaggttacctacatctcatacttgctttaatgtgcttttacttccggaatactcaagcaaagaaaaacttaaagagagattgttgaaggccatcacgtatgccaaaggatttggcatgctgtaa

SEQ ID NO: 1303 - DNA, 1920 bp, synthetic construct
  source 1..1920: mol_type = other DNA; note = HA-NLS-3DX.2-(GS)2-E6AP nucleic acid
atgtacccatacgatgttccagattacgctccggcggcgaaacgcgtgaaactggatggcagcggcagcggcagcgatattgtgctgacccagagcccggcgagcctggcggtgagcctgggccagcgcgcgaccattagctgccgcgcgagcgaaagcgtggataactatggctttagctttatgaactggtttcagcagaaaccgggccagccgccgaaactgctgatttatgcgaccagcaaccgcggcagcggcgtgccggcgcgctttagcggcagcggcagcggcaccgattttagcctgaacattcatccggtggaagaagatgatagcgcgatgtatttttgccagcagaccaaagaagtgccgtggacctttggcggcggcaccaaactggaaattaaacgcggcggcggcggcagcggcggcggcgatagcggcggcggcggcagcgaagtgaaactggtggaaagcggcggcgatctggtgaaaccgggcggcagcctgaaactgagctgcgcggcgagcggctttacctttagccattatggcatgagctgggtgcgccagaccccggataaacgcctggaatgggtggcgaccattggcagccgcggcacctatacccattatccggatagcgtgaaaggccgctttaccattagccgcgataacgataaaaacgcgctgtatctgcagatgaacagcctgcgcaccgaagataccgcgatgtattattgcgcgcgcaaaagcgaattttattattatggcaacacctattattatagcgcgatggattattggggccagggcgcgagcgtgaccgtgagcagcggcagcggcagcaatccatatttgagactcaaagttagacgtgaccatatcatagatgatgcacttgtccggctagagatgatcgctatggaaaatcctgcagacttgaagaagcagttgtatgtggaatttgaaggagaacaaggagttgatgagggaggtgtttccaaagaattttttcagctggttgtggaggaaatcttcaatccagatattggtatgttcacatacgatgaatctacaaaattgttttggtttaatccatcttcttttgaaactgagggtcagtttactctgattggcatagtactgggtctggctatttacaataactgtatactggatgtacattttcccatggttgtctacaggaagctaatggggaaaaaaggaacttttcgtgacttgggagactctcacccagttctatatcagagtttaaaagatttattggagtatgaagggaatgtggaagatgacatgatgatcactttccagatatcacagacagatctttttggtaacccaatgatgtatgatctaaaggaaaatggtgataaaattccaattacaaatgaaaacaggaaggaatttgtcaatctttattctgactacattctcaataaatcagtagaaaaacagttcaaggcttttcggagaggttttcatatggtgaccaatgaatctcccttaaagtacttattcagaccagaagaaattgaattgcttatatgtggaagccggaatctagatttccaagcactagaagaaactacagaatatgacggtggctataccagggactctgttctgattagggagttctgggaaatcgttcattcatttacagatgaacagaaaagactcttcttgcagtttacaacgggcacagacagagcacctgtgggaggactaggaaaattaaagatgattatagccaaaaatggcccagacacagaaaggttacctacatctcatacttgctttaatgtgcttttacttccggaatactcaagcaaagaaaaacttaaagagagattgttgaaggccatcacgtatgccaaaggatttggcatgctgtaa

SEQ ID NO: 1304 - DNA, 1926 bp, synthetic construct
  source 1..1926: mol_type = other DNA; note = HA-NLS-3DX.2-(GS)3-E6AP nucleic acid
atgtacccatacgatgttccagattacgctccggcggcgaaacgcgtgaaactggatggcagcggcagcggcagcgatattgtgctgacccagagcccggcgagcctggcggtgagcctgggccagcgcgcgaccattagctgccgcgcgagcgaaagcgtggataactatggctttagctttatgaactggtttcagcagaaaccgggccagccgccgaaactgctgatttatgcgaccagcaaccgcggcagcggcgtgccggcgcgctttagcggcagcggcagcggcaccgattttagcctgaacattcatccggtggaagaagatgatagcgcgatgtatttttgccagcagaccaaagaagtgccgtggacctttggcggcggcaccaaactggaaattaaacgcggcggcggcggcagcggcggcggcgatagcggcggcggcggcagcgaagtgaaactggtggaaagcggcggcgatctggtgaaaccgggcggcagcctgaaactgagctgcgcggcgagcggctttacctttagccattatggcatgagctgggtgcgccagaccccggataaacgcctggaatgggtggcgaccattggcagccgcggcacctatacccattatccggatagcgtgaaaggccgctttaccattagccgcgataacgataaaaacgcgctgtatctgcagatgaacagcctgcgcaccgaagataccgcgatgtattattgcgcgcgcaaaagcgaattttattattatggcaacacctattattatagcgcgatggattattggggccagggcgcgagcgtgaccgtgagcagcggcagcggcagcggcagcaatccatatttgagactcaaagttagacgtgaccatatcatagatgatgcacttgtccggctagagatgatcgctatggaaaatcctgcagacttgaagaagcagttgtatgtggaatttgaaggagaacaaggagttgatgagggaggtgtttccaaagaattttttcagctggttgtggaggaaatcttcaatccagatattggtatgttcacatacgatgaatctacaaaattgttttggtttaatccatcttcttttgaaactgagggtcagtttactctgattggcatagtactgggtctggctatttacaataactgtatactggatgtacattttcccatggttgtctacaggaagctaatggggaaaaaaggaacttttcgtgacttgggagactctcacccagttctatatcagagtttaaaagatttattggagtatgaagggaatgtggaagatgacatgatgatcactttccagatatcacagacagatctttttggtaacccaatgatgtatgatctaaaggaaaatggtgataaaattccaattacaaatgaaaacaggaaggaatttgtcaatctttattctgactacattctcaataaatcagtagaaaaacagttcaaggcttttcggagaggttttcatatggtgaccaatgaatctcccttaaagtacttattcagaccagaagaaattgaattgcttatatgtggaagccggaatctagatttccaagcactagaagaaactacagaatatgacggtggctataccagggactctgttctgattagggagttctgggaaatcgttcattcatttacagatgaacagaaaagactcttcttgcagtttacaacgggcacagacagagcacctgtgggaggactaggaaaattaaagatgattatagccaaaaatggcccagacacagaaaggttacctacatctcatacttgctttaatgtgcttttacttccggaatactcaagcaaagaaaaacttaaagagagattgttgaaggccatcacgtatgccaaaggatttggcatgctgtaa

SEQ ID NO: 1305 - DNA, 1932 bp, synthetic construct
  source 1..1932: mol_type = other DNA; note = HA-NLS-3DX.2-(GS)4-E6AP nucleic acid
atgtacccatacgatgttccagattacgctccggcggcgaaacgcgtgaaactggatggcagcggcagcggcagcgatattgtgctgacccagagcccggcgagcctggcggtgagcctgggccagcgcgcgaccattagctgccgcgcgagcgaaagcgtggataactatggctttagctttatgaactggtttcagcagaaaccgggccagccgccgaaactgctgatttatgcgaccagcaaccgcggcagcggcgtgccggcgcgctttagcggcagcggcagcggcaccgattttagcctgaacattcatccggtggaagaagatgatagcgcgatgtatttttgccagcagaccaaagaagtgccgtggacctttggcggcggcaccaaactggaaattaaacgcggcggcggcggcagcggcggcggcgatagcggcggcggcggcagcgaagtgaaactggtggaaagcggcggcgatctggtgaaaccgggcggcagcctgaaactgagctgcgcggcgagcggctttacctttagccattatggcatgagctgggtgcgccagaccccggataaacgcctggaatgggtggcgaccattggcagccgcggcacctatacccattatccggatagcgtgaaaggccgctttaccattagccgcgataacgataaaaacgcgctgtatctgcagatgaacagcctgcgcaccgaagataccgcgatgtattattgcgcgcgcaaaagcgaattttattattatggcaacacctattattatagcgcgatggattattggggccagggcgcgagcgtgaccgtgagcagcggcagcggcagcggcagcggcagcaatccatatttgagactcaaagttagacgtgaccatatcatagatgatgcacttgtccggctagagatgatcgctatggaaaatcctgcagacttgaagaagcagttgtatgtggaatttgaaggagaacaaggagttgatgagggaggtgtttccaaagaattttttcagctggttgtggaggaaatcttcaatccagatattggtatgttcacatacgatgaatctacaaaattgttttggtttaatccatcttcttttgaaactgagggtcagtttactctgattggcatagtactgggtctggctatttacaataactgtatactggatgtacattttcccatggttgtctacaggaagctaatggggaaaaaaggaacttttcgtgacttgggagactctcacccagttctatatcagagtttaaaagatttattggagtatgaagggaatgtggaagatgacatgatgatcactttccagatatcacagacagatctttttggtaacccaatgatgtatgatctaaaggaaaatggtgataaaattccaattacaaatgaaaacaggaaggaatttgtcaatctttattctgactacattctcaataaatcagtagaaaaacagttcaaggcttttcggagaggttttcatatggtgaccaatgaatctcccttaaagtacttattcagaccagaagaaattgaattgcttatatgtggaagccggaatctagatttccaagcactagaagaaactacagaatatgacggtggctataccagggactctgttctgattagggagttctgggaaatcgttcattcatttacagatgaacagaaaagactcttcttgcagtttacaacgggcacagacagagcacctgtgggaggactaggaaaattaaagatgattatagccaaaaatggcccagacacagaaaggttacctacatctcatacttgctttaatgtgcttttacttccggaatactcaagcaaagaaaaacttaaagagagattgttgaaggccatcacgtatgccaaaggatttggcatgctgtaa

SEQ ID NO: 1306 - DNA, 1938 bp, synthetic construct
  source 1..1938: mol_type = other DNA; note = HA-NLS-3DX.2-(GS)5-E6AP nucleic acid
atgtacccatacgatgttccagattacgctccggcggcgaaacgcgtgaaactggatggcagcggcagcggcagcgatattgtgctgacccagagcccggcgagcctggcggtgagcctgggccagcgcgcgaccattagctgccgcgcgagcgaaagcgtggataactatggctttagctttatgaactggtttcagcagaaaccgggccagccgccgaaactgctgatttatgcgaccagcaaccgcggcagcggcgtgccggcgcgctttagcggcagcggcagcggcaccgattttagcctgaacattcatccggtggaagaagatgatagcgcgatgtatttttgccagcagaccaaagaagtgccgtggacctttggcggcggcaccaaactggaaattaaacgcggcggcggcggcagcggcggcggcgatagcggcggcggcggcagcgaagtgaaactggtggaaagcggcggcgatctggtgaaaccgggcggcagcctgaaactgagctgcgcggcgagcggctttacctttagccattatggcatgagctgggtgcgccagaccccggataaacgcctggaatgggtggcgaccattggcagccgcggcacctatacccattatccggatagcgtgaaaggccgctttaccattagccgcgataacgataaaaacgcgctgtatctgcagatgaacagcctgcgcaccgaagataccgcgatgtattattgcgcgcgcaaaagcgaattttattattatggcaacacctattattatagcgcgatggattattggggccagggcgcgagcgtgaccgtgagcagcggcagcggcagcggcagcggcagcggcagcaatccatatttgagactcaaagttagacgtgaccatatcatagatgatgcacttgtccggctagagatgatcgctatggaaaatcctgcagacttgaagaagcagttgtatgtggaatttgaaggagaacaaggagttgatgagggaggtgtttccaaagaattttttcagctggttgtggaggaaatcttcaatccagatattggtatgttcacatacgatgaatctacaaaattgttttggtttaatccatcttcttttgaaactgagggtcagtttactctgattggcatagtactgggtctggctatttacaataactgtatactggatgtacattttcccatggttgtctacaggaagctaatggggaaaaaaggaacttttcgtgacttgggagactctcacccagttctatatcagagtttaaaagatttattggagtatgaagggaatgtggaagatgacatgatgatcactttccagatatcacagacagatctttttggtaacccaatgatgtatgatctaaaggaaaatggtgataaaattccaattacaaatgaaaacaggaaggaatttgtcaatctttattctgactacattctcaataaatcagtagaaaaacagttcaaggcttttcggagaggttttcatatggtgaccaatgaatctcccttaaagtacttattcagaccagaagaaattgaattgcttatatgtggaagccggaatctagatttccaagcactagaagaaactacagaatatgacggtggctataccagggactctgttctgattagggagttctgggaaatcgttcattcatttacagatgaacagaaaagactcttcttgcagtttacaacgggcacagacagagcacctgtgggaggactaggaaaattaaagatgattatagccaaaaatggcccagacacagaaaggttacctacatctcatacttgctttaatgtgcttttacttccggaatactcaagcaaagaaaaacttaaagagagattgttgaaggccatcacgtatgccaaaggatttggcatgctgtaa

SEQ ID NO: 1307 - DNA, 1944 bp, synthetic construct
  source 1..1944: mol_type = other DNA; note = HA-NLS-3DX.2-(GS)6-E6AP nucleic acid
atgtacccatacgatgttccagattacgctccggcggcgaaacgcgtgaaactggatggcagcggcagcggcagcgatattgtgctgacccagagcccggcgagcctggcggtgagcctgggccagcgcgcgaccattagctgccgcgcgagcgaaagcgtggataactatggctttagctttatgaactggtttcagcagaaaccgggccagccgccgaaactgctgatttatgcgaccagcaaccgcggcagcggcgtgccggcgcgctttagcggcagcggcagcggcaccgattttagcctgaacattcatccggtggaagaagatgatagcgcgatgtatttttgccagcagaccaaagaagtgccgtggacctttggcggcggcaccaaactggaaattaaacgcggcggcggcggcagcggcggcggcgatagcggcggcggcggcagcgaagtgaaactggtggaaagcggcggcgatctggtgaaaccgggcggcagcctgaaactgagctgcgcggcgagcggctttacctttagccattatggcatgagctgggtgcgccagaccccggataaacgcctggaatgggtggcgaccattggcagccgcggcacctatacccattatccggatagcgtgaaaggccgctttaccattagccgcgataacgataaaaacgcgctgtatctgcagatgaacagcctgcgcaccgaagataccgcgatgtattattgcgcgcgcaaaagcgaattttattattatggcaacacctattattatagcgcgatggattattggggccagggcgcgagcgtgaccgtgagcagcggcagcggcagcggcagcggcagcggcagcggcagcaatccatatttgagactcaaagttagacgtgaccatatcatagatgatgcacttgtccggctagagatgatcgctatggaaaatcctgcagacttgaagaagcagttgtatgtggaatttgaaggagaacaaggagttgatgagggaggtgtttccaaagaattttttcagctggttgtggaggaaatcttcaatccagatattggtatgttcacatacgatgaatctacaaaattgttttggtttaatccatcttcttttgaaactgagggtcagtttactctgattggcatagtactgggtctggctatttacaataactgtatactggatgtacattttcccatggttgtctacaggaagctaatggggaaaaaaggaacttttcgtgacttgggagactctcacccagttctatatcagagtttaaaagatttattggagtatgaagggaatgtggaagatgacatgatgatcactttccagatatcacagacagatctttttggtaacccaatgatgtatgatctaaaggaaaatggtgataaaattccaattacaaatgaaaacaggaaggaatttgtcaatctttattctgactacattctcaataaatcagtagaaaaacagttcaaggcttttcggagaggttttcatatggtgaccaatgaatctcccttaaagtacttattcagaccagaagaaattgaattgcttatatgtggaagccggaatctagatttccaagcactagaagaaactacagaatatgacggtggctataccagggactctgttctgattagggagttctgggaaatcgttcattcatttacagatgaacagaaaagactcttcttgcagtttacaacgggcacagacagagcacctgtgggaggactaggaaaattaaagatgattatagccaaaaatggcccagacacagaaaggttacctacatctcatacttgctttaatgtgcttttacttccggaatactcaagcaaagaaaaacttaaagagagattgttgaaggccatcacgtatgccaaaggatttggcatgctgtaa

SEQ ID NO: 1308 - DNA, 1872 bp, synthetic construct
  source 1..1872: mol_type = other DNA; note = FBXW7a-(GS)1-3DX.2 nucleic acid
aatcaggaactgctctctgtgggcagcaaaagacgacgaactggaggctctctgagaggtaacccttcctcaagccaggtagatgaagaacagatgaatcgtgtggtagaggaggaacagcaacagcaactcagacaacaagaggaggagcacactgcaaggaatggtgaagttgttggagtagaacctagacctggaggccaaaatgattcccagcaaggacagttggaagaaaacaataatagatttatttcggtagatgaggactcctcaggaaaccaagaagaacaagaggaagatgaagaacatgctggtgaacaagatgaggaggatgaggaggaggaggagatggaccaggagagtgacgattttgatcagtctgatgatagtagcagagaagatgaacatacacatactaacagtgtcacgaactccagtagtattgtggacctgcccgttcaccaactctcctccccattctatacaaaaacaacaaaaatgaaaagaaagttggaccatggttctgaggtccgctctttttctttgggaaagaaaccatgcaaagtctcagaatatacaagtaccactgggcttgtaccatgttcagcaacaccaacaacttttggggacctcagagcagccaatggccaagggcaacaacgacgccgaattacatctgtccagccacctacaggcctccaggaatggctaaaaatgtttcagagctggagtggaccagagaaattgcttgctttagatgaactcattgatagttgtgaaccaacacaagtaaaacatatgatgcaagtgatagaaccccagtttcaacgagacttcatttcattgctccctaaagagttggcactctatgtgctttcattcctggaacccaaagacctgctacaagcagctcagacatgtcgctactggagaattttggctgaagacaaccttctctggagagagaaatgcaaagaagaggggattgatgaaccattgcacatcaagagaagaaaagtaataaaaccaggtttcatacacagtccatggaaaagtgcatacatcagacagcacagaattgatactaactcgaggcgaggaggcagcgatattgtgctgacccagagcccggcgagcctggcggtgagcctgggccagcgcgcgaccattagctgccgcgcgagcgaaagcgtggataactatggctttagctttatgaactggtttcagcagaaaccgggccagccgccgaaactgctgatttatgcgaccagcaaccgcggcagcggcgtgccggcgcgctttagcggcagcggcagcggcaccgattttagcctgaacattcatccggtggaagaagatgatagcgcgatgtatttttgccagcagaccaaagaagtgccgtggacctttggcggcggcaccaaactggaaattaaacgcggcggcggcggcagcggcggcggcgatagcggcggcggcggcagcgaagtgaaactggtggaaagcggcggcgatctggtgaaaccgggcggcagcctgaaactgagctgcgcggcgagcggctttacctttagccattatggcatgagctgggtgcgccagaccccggataaacgcctggaatgggtggcgaccattggcagccgcggcacctatacccattatccggatagcgtgaaaggccgctttaccattagccgcgataacgataaaaacgcgctgtatctgcagatgaacagcctgcgcaccgaagataccgcgatgtattattgcgcgcgcaaaagcgaattttattattatggcaacacctattattatagcgcgatggattattggggccagggcgcgagcgtgaccgtgagcagctaa

SEQ ID NO: 1309 - DNA, 1878 bp, synthetic construct
  source 1..1878: mol_type = other DNA; note = FBXW7a-(GS)2-3DX.2 nucleic acid
aatcaggaactgctctctgtgggcagcaaaagacgacgaactggaggctctctgagaggtaacccttcctcaagccaggtagatgaagaacagatgaatcgtgtggtagaggaggaacagcaacagcaactcagacaacaagaggaggagcacactgcaaggaatggtgaagttgttggagtagaacctagacctggaggccaaaatgattcccagcaaggacagttggaagaaaacaataatagatttatttcggtagatgaggactcctcaggaaaccaagaagaacaagaggaagatgaagaacatgctggtgaacaagatgaggaggatgaggaggaggaggagatggaccaggagagtgacgattttgatcagtctgatgatagtagcagagaagatgaacatacacatactaacagtgtcacgaactccagtagtattgtggacctgcccgttcaccaactctcctccccattctatacaaaaacaacaaaaatgaaaagaaagttggaccatggttctgaggtccgctctttttctttgggaaagaaaccatgcaaagtctcagaatatacaagtaccactgggcttgtaccatgttcagcaacaccaacaacttttggggacctcagagcagccaatggccaagggcaacaacgacgccgaattacatctgtccagccacctacaggcctccaggaatggctaaaaatgtttcagagctggagtggaccagagaaattgcttgctttagatgaactcattgatagttgtgaaccaacacaagtaaaacatatgatgcaagtgatagaaccccagtttcaacgagacttcatttcattgctccctaaagagttggcactctatgtgctttcattcctggaacccaaagacctgctacaagcagctcagacatgtcgctactggagaattttggctgaagacaaccttctctggagagagaaatgcaaagaagaggggattgatgaaccattgcacatcaagagaagaaaagtaataaaaccaggtttcatacacagtccatggaaaagtgcatacatcagacagcacagaattgatactaactcgaggcgaggaggcagcggcagcgatattgtgctgacccagagcccggcgagcctggcggtgagcctgggccagcgcgcgaccattagctgccgcgcgagcgaaagcgtggataactatggctttagctttatgaactggtttcagcagaaaccgggccagccgccgaaactgctgatttatgcgaccagcaaccgcggcagcggcgtgccggcgcgctttagcggcagcggcagcggcaccgattttagcctgaacattcatccggtggaagaagatgatagcgcgatgtatttttgccagcagaccaaagaagtgccgtggacctttggcggcggcaccaaactggaaattaaacgcggcggcggcggcagcggcggcggcgatagcggcggcggcggcagcgaagtgaaactggtggaaagcggcggcgatctggtgaaaccgggcggcagcctgaaactgagctgcgcggcgagcggctttacctttagccattatggcatgagctgggtgcgccagaccccggataaacgcctggaatgggtggcgaccattggcagccgcggcacctatacccattatccggatagcgtgaaaggccgctttaccattagccgcgataacgataaaaacgcgctgtatctgcagatgaacagcctgcgcaccgaagataccgcgatgtattattgcgcgcgcaaaagcgaattttattattatggcaacacctattattatagcgcgatggattattggggccagggcgcgagcgtgaccgtgagcagctaa

SEQ ID NO: 1310 - DNA, 1884 bp, synthetic construct
  source 1..1884: mol_type = other DNA; note = FBXW7a-(GS)3-3DX.2 nucleic acid
aatcaggaactgctctctgtgggcagcaaaagacgacgaactggaggctctctgagaggtaacccttcctcaagccaggtagatgaagaacagatgaatcgtgtggtagaggaggaacagcaacagcaactcagacaacaagaggaggagcacactgcaaggaatggtgaagttgttggagtagaacctagacctggaggccaaaatgattcccagcaaggacagttggaagaaaacaataatagatttatttcggtagatgaggactcctcaggaaaccaagaagaacaagaggaagatgaagaacatgctggtgaacaagatgaggaggatgaggaggaggaggagatggaccaggagagtgacgattttgatcagtctgatgatagtagcagagaagatgaacatacacatactaacagtgtcacgaactccagtagtattgtggacctgcccgttcaccaactctcctccccattctatacaaaaacaacaaaaatgaaaagaaagttggaccatggttctgaggtccgctctttttctttgggaaagaaaccatgcaaagtctcagaatatacaagtaccactgggcttgtaccatgttcagcaacaccaacaacttttggggacctcagagcagccaatggccaagggcaacaacgacgccgaattacatctgtccagccacctacaggcctccaggaatggctaaaaatgtttcagagctggagtggaccagagaaattgcttgctttagatgaactcattgatagttgtgaaccaacacaagtaaaacatatgatgcaagtgatagaaccccagtttcaacgagacttcatttcattgctccctaaagagttggcactctatgtgctttcattcctggaacccaaagacctgctacaagcagctcagacatgtcgctactggagaattttggctgaagacaaccttctctggagagagaaatgcaaagaagaggggattgatgaaccattgcacatcaagagaagaaaagtaataaaaccaggtttcatacacagtccatggaaaagtgcatacatcagacagcacagaattgatactaactcgaggcgaggaggcagcggcagcggcagcgatattgtgctgacccagagcccggcgagcctggcggtgagcctgggccagcgcgcgaccattagctgccgcgcgagcgaaagcgtggataactatggctttagctttatgaactggtttcagcagaaaccgggccagccgccgaaactgctgatttatgcgaccagcaaccgcggcagcggcgtgccggcgcgctttagcggcagcggcagcggcaccgattttagcctgaacattcatccggtggaagaagatgatagcgcgatgtatttttgccagcagaccaaagaagtgccgtggacctttggcggcggcaccaaactggaaattaaacgcggcggcggcggcagcggcggcggcgatagcggcggcggcggcagcgaagtgaaactggtggaaagcggcggcgatctggtgaaaccgggcggcagcctgaaactgagctgcgcggcgagcggctttacctttagccattatggcatgagctgggtgcgccagaccccggataaacgcctggaatgggtggcgaccattggcagccgcggcacctatacccattatccggatagcgtgaaaggccgctttaccattagccgcgataacgataaaaacgcgctgtatctgcagatgaacagcctgcgcaccgaagataccgcgatgtattattgcgcgcgcaaaagcgaattttattattatggcaacacctattattatagcgcgatggattattggggccagggcgcgagcgtgaccgtgagcagctaa

SEQ ID NO: 1311 - DNA, 1890 bp, synthetic construct
  source 1..1890: mol_type = other DNA; note = FBXW7a-(GS)4-3DX.2 nucleic acid
aatcaggaactgctctctgtgggcagcaaaagacgacgaactggaggctctctgagaggtaacccttcctcaagccaggtagatgaagaacagatgaatcgtgtggtagaggaggaacagcaacagcaactcagacaacaagaggaggagcacactgcaaggaatggtgaagttgttggagtagaacctagacctggaggccaaaatgattcccagcaaggacagttggaagaaaacaataatagatttatttcggtagatgaggactcctcaggaaaccaagaagaacaagaggaagatgaagaacatgctggtgaacaagatgaggaggatgaggaggaggaggagatggaccaggagagtgacgattttgatcagtctgatgatagtagcagagaagatgaacatacacatactaacagtgtcacgaactccagtagtattgtggacctgcccgttcaccaactctcctccccattctatacaaaaacaacaaaaatgaaaagaaagttggaccatggttctgaggtccgctctttttctttgggaaagaaaccatgcaaagtctcagaatatacaagtaccactgggcttgtaccatgttcagcaacaccaacaacttttggggacctcagagcagccaatggccaagggcaacaacgacgccgaattacatctgtccagccacctacaggcctccaggaatggctaaaaatgtttcagagctggagtggaccagagaaattgcttgctttagatgaactcattgatagttgtgaaccaacacaagtaaaacatatgatgcaagtgatagaaccccagtttcaacgagacttcatttcattgctccctaaagagttggcactctatgtgctttcattcctggaacccaaagacctgctacaagcagctcagacatgtcgctactggagaattttggctgaagacaaccttctctggagagagaaatgcaaagaagaggggattgatgaaccattgcacatcaagagaagaaaagtaataaaaccaggtttcatacacagtccatggaaaagtgcatacatcagacagcacagaattgatactaactcgaggcgaggaggcagcggcagcggcagcggcagcgatattgtgctgacccagagcccggcgagcctggcggtgagcctgggccagcgcgcgaccattagctgccgcgcgagcgaaagcgtggataactatggctttagctttatgaactggtttcagcagaaaccgggccagccgccgaaactgctgatttatgcgaccagcaaccgcggcagcggcgtgccggcgcgctttagcggcagcggcagcggcaccgattttagcctgaacattcatccggtggaagaagatgatagcgcgatgtatttttgccagcagaccaaagaagtgccgtggacctttggcggcggcaccaaactggaaattaaacgcggcggcggcggcagcggcggcggcgatagcggcggcggcggcagcgaagtgaaactggtggaaagcggcggcgatctggtgaaaccgggcggcagcctgaaactgagctgcgcggcgagcggctttacctttagccattatggcatgagctgggtgcgccagaccccggataaacgcctggaatgggtggcgaccattggcagccgcggcacctatacccattatccggatagcgtgaaaggccgctttaccattagccgcgataacgataaaaacgcgctgtatctgcagatgaacagcctgcgcaccgaagataccgcgatgtattattgcgcgcgcaaaagcgaattttattattatggcaacacctattattatagcgcgatggattattggggccagggcgcgagcgtgaccgtgagcagctaa

SEQ ID NO: 1312 - DNA, 1896 bp, synthetic construct
  source 1..1896: mol_type = other DNA; note = FBXW7a-(GS)5-3DX.2 nucleic acid
aatcaggaactgctctctgtgggcagcaaaagacgacgaactggaggctctctgagaggtaacccttcctcaagccaggtagatgaagaacagatgaatcgtgtggtagaggaggaacagcaacagcaactcagacaacaagaggaggagcacactgcaaggaatggtgaagttgttggagtagaacctagacctggaggccaaaatgattcccagcaaggacagttggaagaaaacaataatagatttatttcggtagatgaggactcctcaggaaaccaagaagaacaagaggaagatgaagaacatgctggtgaacaagatgaggaggatgaggaggaggaggagatggaccaggagagtgacgattttgatcagtctgatgatagtagcagagaagatgaacatacacatactaacagtgtcacgaactccagtagtattgtggacctgcccgttcaccaactctcctccccattctatacaaaaacaacaaaaatgaaaagaaagttggaccatggttctgaggtccgctctttttctttgggaaagaaaccatgcaaagtctcagaatatacaagtaccactgggcttgtaccatgttcagcaacaccaacaacttttggggacctcagagcagccaatggccaagggcaacaacgacgccgaattacatctgtccagccacctacaggcctccaggaatggctaaaaatgtttcagagctggagtggaccagagaaattgcttgctttagatgaactcattgatagttgtgaaccaacacaagtaaaacatatgatgcaagtgatagaaccccagtttcaacgagacttcatttcattgctccctaaagagttggcactctatgtgctttcattcctggaacccaaagacctgctacaagcagctcagacatgtcgctactggagaattttggctgaagacaaccttctctggagagagaaatgcaaagaagaggggattgatgaaccattgcacatcaagagaagaaaagtaataaaaccaggtttcatacacagtccatggaaaagtgcatacatcagacagcacagaattgatactaactcgaggcgaggaggcagcggcagcggcagcggcagcggcagcgatattgtgctgacccagagcccggcgagcctggcggtgagcctgggccagcgcgcgaccattagctgccgcgcgagcgaaagcgtggataactatggctttagctttatgaactggtttcagcagaaaccgggccagccgccgaaactgctgatttatgcgaccagcaaccgcggcagcggcgtgccggcgcgctttagcggcagcggcagcggcaccgattttagcctgaacattcatccggtggaagaagatgatagcgcgatgtatttttgccagcagaccaaagaagtgccgtggacctttggcggcggcaccaaactggaaattaaacgcggcggcggcggcagcggcggcggcgatagcggcggcggcggcagcgaagtgaaactggtggaaagcggcggcgatctggtgaaaccgggcggcagcctgaaactgagctgcgcggcgagcggctttacctttagccattatggcatgagctgggtgcgccagaccccggataaacgcctggaatgggtggcgaccattggcagccgcggcacctatacccattatccggatagcgtgaaaggccgctttaccattagccgcgataacgataaaaacgcgctgtatctgcagatgaacagcctgcgcaccgaagataccgcgatgtattattgcgcgcgcaaaagcgaattttattattatggcaacacctattattatagcgcgatggattattggggccagggcgcgagcgtgaccgtgagcagctaa

SEQ ID NO: 1313 - DNA, 1902 bp, synthetic construct
  source 1..1902: mol_type = other DNA; note = FBXW7a-(GS)6-3DX.2 nucleic acid
aatcaggaactgctctctgtgggcagcaaaagacgacgaactggaggctctctgagaggtaacccttcctcaagccaggtagatgaagaacagatgaatcgtgtggtagaggaggaacagcaacagcaactcagacaacaagaggaggagcacactgcaaggaatggtgaagttgttggagtagaacctagacctggaggccaaaatgattcccagcaaggacagttggaagaaaacaataatagatttatttcggtagatgaggactcctcaggaaaccaagaagaacaagaggaagatgaagaacatgctggtgaacaagatgaggaggatgaggaggaggaggagatggaccaggagagtgacgattttgatcagtctgatgatagtagcagagaagatgaacatacacatactaacagtgtcacgaactccagtagtattgtggacctgcccgttcaccaactctcctccccattctatacaaaaacaacaaaaatgaaaagaaagttggaccatggttctgaggtccgctctttttctttgggaaagaaaccatgcaaagtctcagaatatacaagtaccactgggcttgtaccatgttcagcaacaccaacaacttttggggacctcagagcagccaatggccaagggcaacaacgacgccgaattacatctgtccagccacctacaggcctccaggaatggctaaaaatgtttcagagctggagtggaccagagaaattgcttgctttagatgaactcattgatagttgtgaaccaacacaagtaaaacatatgatgcaagtgatagaaccccagtttcaacgagacttcatttcattgctccctaaagagttggcactctatgtgctttcattcctggaacccaaagacctgctacaagcagctcagacatgtcgctactggagaattttggctgaagacaaccttctctggagagagaaatgcaaagaagaggggattgatgaaccattgcacatcaagagaagaaaagtaataaaaccaggtttcatacacagtccatggaaaagtgcatacatcagacagcacagaattgatactaactcgaggcgaggaggcagcggcagcggcagcggcagcggcagcggcagcgatattgtgctgacccagagcccggcgagcctggcggtgagcctgggccagcgcgcgaccattagctgccgcgcgagcgaaagcgtggataactatggctttagctttatgaactggtttcagcagaaaccgggccagccgccgaaactgctgatttatgcgaccagcaaccgcggcagcggcgtgccggcgcgctttagcggcagcggcagcggcaccgattttagcctgaacattcatccggtggaagaagatgatagcgcgatgtatttttgccagcagaccaaagaagtgccgtggacctttggcggcggcaccaaactggaaattaaacgcggcggcggcggcagcggcggcggcgatagcggcggcggcggcagcgaagtgaaactggtggaaagcggcggcgatctggtgaaaccgggcggcagcctgaaactgagctgcgcggcgagcggctttacctttagccattatggcatgagctgggtgcgccagaccccggataaacgcctggaatgggtggcgaccattggcagccgcggcacctatacccattatccggatagcgtgaaaggccgctttaccattagccgcgataacgataaaaacgcgctgtatctgcagatgaacagcctgcgcaccgaagataccgcgatgtattattgcgcgcgcaaaagcgaattttattattatggcaacacctattattatagcgcgatggattattggggccagggcgcgagcgtgaccgtgagcagctaa

SEQ ID NO: 1314 - DNA, 1902 bp, synthetic construct
  source 1..1902: mol_type = other DNA; note = HA-FBXW7a-(GS)1-3DX.2 nucleic acid
atgtacccatacgatgttccagattacgctaatcaggaactgctctctgtgggcagcaaaagacgacgaactggaggctctctgagaggtaacccttcctcaagccaggtagatgaagaacagatgaatcgtgtggtagaggaggaacagcaacagcaactcagacaacaagaggaggagcacactgcaaggaatggtgaagttgttggagtagaacctagacctggaggccaaaatgattcccagcaaggacagttggaagaaaacaataatagatttatttcggtagatgaggactcctcaggaaaccaagaagaacaagaggaagatgaagaacatgctggtgaacaagatgaggaggatgaggaggaggaggagatggaccaggagagtgacgattttgatcagtctgatgatagtagcagagaagatgaacatacacatactaacagtgtcacgaactccagtagtattgtggacctgcccgttcaccaactctcctccccattctatacaaaaacaacaaaaatgaaaagaaagttggaccatggttctgaggtccgctctttttctttgggaaagaaaccatgcaaagtctcagaatatacaagtaccactgggcttgtaccatgttcagcaacaccaacaacttttggggacctcagagcagccaatggccaagggcaacaacgacgccgaattacatctgtccagccacctacaggcctccaggaatggctaaaaatgtttcagagctggagtggaccagagaaattgcttgctttagatgaactcattgatagttgtgaaccaacacaagtaaaacatatgatgcaagtgatagaaccccagtttcaacgagacttcatttcattgctccctaaagagttggcactctatgtgctttcattcctggaacccaaagacctgctacaagcagctcagacatgtcgctactggagaattttggctgaagacaaccttctctggagagagaaatgcaaagaagaggggattgatgaaccattgcacatcaagagaagaaaagtaataaaaccaggtttcatacacagtccatggaaaagtgcatacatcagacagcacagaattgatactaactcgaggcgaggaggcagcgatattgtgctgacccagagcccggcgagcctggcggtgagcctgggccagcgcgcgaccattagctgccgcgcgagcgaaagcgtggataactatggctttagctttatgaactggtttcagcagaaaccgggccagccgccgaaactgctgatttatgcgaccagcaaccgcggcagcggcgtgccggcgcgctttagcggcagcggcagcggcaccgattttagcctgaacattcatccggtggaagaagatgatagcgcgatgtatttttgccagcagaccaaagaagtgccgtggacctttggcggcggcaccaaactggaaattaaacgcggcggcggcggcagcggcggcggcgatagcggcggcggcggcagcgaagtgaaactggtggaaagcggcggcgatctggtgaaaccgggcggcagcctgaaactgagctgcgcggcgagcggctttacctttagccattatggcatgagctgggtgcgccagaccccggataaacgcctggaatgggtggcgaccattggcagccgcggcacctatacccattatccggatagcgtgaaaggccgctttaccattagccgcgataacgataaaaacgcgctgtatctgcagatgaacagcctgcgcaccgaagataccgcgatgtattattgcgcgcgcaaaagcgaattttattattatggcaacacctattattatagcgcgatggattattggggccagggcgcgagcgtgaccgtgagcagctaa

SEQ ID NO: 1315 - DNA, 1908 bp, synthetic construct
  source 1..1908: mol_type = other DNA; note = HA-FBXW7a-(GS)2-3DX.2 nucleic acid
atgtacccatacgatgttccagattacgctaatcaggaactgctctctgtgggcagcaaaagacgacgaactggaggctctctgagaggtaacccttcctcaagccaggtagatgaagaacagatgaatcgtgtggtagaggaggaacagcaacagcaactcagacaacaagaggaggagcacactgcaaggaatggtgaagttgttggagtagaacctagacctggaggccaaaatgattcccagcaaggacagttggaagaaaacaataatagatttatttcggtagatgaggactcctcaggaaaccaagaagaacaagaggaagatgaagaacatgctggtgaacaagatgaggaggatgaggaggaggaggagatggaccaggagagtgacgattttgatcagtctgatgatagtagcagagaagatgaacatacacatactaacagtgtcacgaactccagtagtattgtggacctgcccgttcaccaactctcctccccattctatacaaaaacaacaaaaatgaaaagaaagttggaccatggttctgaggtccgctctttttctttgggaaagaaaccatgcaaagtctcagaatatacaagtaccactgggcttgtaccatgttcagcaacaccaacaacttttggggacctcagagcagccaatggccaagggcaacaacgacgccgaattacatctgtccagccacctacaggcctccaggaatggctaaaaatgtttcagagctggagtggaccagagaaattgcttgctttagatgaactcattgatagttgtgaaccaacacaagtaaaacatatgatgcaagtgatagaaccccagtttcaacgagacttcatttcattgctccctaaagagttggcactctatgtgctttcattcctggaacccaaagacctgctacaagcagctcagacatgtcgctactggagaattttggctgaagacaaccttctctggagagagaaatgcaaagaagaggggattgatgaaccattgcacatcaagagaagaaaagtaataaaaccaggtttcatacacagtccatggaaaagtgcatacatcagacagcacagaattgatactaactcgaggcgaggaggcagcggcagcgatattgtgctgacccagagcccggcgagcctggcggtgagcctgggccagcgcgcgaccattagctgccgcgcgagcgaaagcgtggataactatggctttagctttatgaactggtttcagcagaaaccgggccagccgccgaaactgctgatttatgcgaccagcaaccgcggcagcggcgtgccggcgcgctttagcggcagcggcagcggcaccgattttagcctgaacattcatccggtggaagaagatgatagcgcgatgtatttttgccagcagaccaaagaagtgccgtggacctttggcggcggcaccaaactggaaattaaacgcggcggcggcggcagcggcggcggcgatagcggcggcggcggcagcgaagtgaaactggtggaaagcggcggcgatctggtgaaaccgggcggcagcctgaaactgagctgcgcggcgagcggctttacctttagccattatggcatgagctgggtgcgccagaccccggataaacgcctggaatgggtggcgaccattggcagccgcggcacctatacccattatccggatagcgtgaaaggccgctttaccattagccgcgataacgataaaaacgcgctgtatctgcagatgaacagcctgcgcaccgaagataccgcgatgtattattgcgcgcgcaaaagcgaattttattattatggcaacacctattattatagcgcgatggattattggggccagggcgcgagcgtgaccgtgagcagctaa

SEQ ID NO: 1316 - DNA, 1914 bp, synthetic construct
  source 1..1914: mol_type = other DNA; note = HA-FBXW7a-(GS)3-3DX.2 nucleic acid
atgtacccatacgatgttccagattacgctaatcaggaactgctctctgtgggcagcaaaagacgacgaactggaggctctctgagaggtaacccttcctcaagccaggtagatgaagaacagatgaatcgtgtggtagaggaggaacagcaacagcaactcagacaacaagaggaggagcacactgcaaggaatggtgaagttgttggagtagaacctagacctggaggccaaaatgattcccagcaaggacagttggaagaaaacaataatagatttatttcggtagatgaggactcctcaggaaaccaagaagaacaagaggaagatgaagaacatgctggtgaacaagatgaggaggatgaggaggaggaggagatggaccaggagagtgacgattttgatcagtctgatgatagtagcagagaagatgaacatacacatactaacagtgtcacgaactccagtagtattgtggacctgcccgttcaccaactctcctccccattctatacaaaaacaacaaaaatgaaaagaaagttggaccatggttctgaggtccgctctttttctttgggaaagaaaccatgcaaagtctcagaatatacaagtaccactgggcttgtaccatgttcagcaacaccaacaacttttggggacctcagagcagccaatggccaagggcaacaacgacgccgaattacatctgtccagccacctacaggcctccaggaatggctaaaaatgtttcagagctggagtggaccagagaaattgcttgctttagatgaactcattgatagttgtgaaccaacacaagtaaaacatatgatgcaagtgatagaaccccagtttcaacgagacttcatttcattgctccctaaagagttggcactctatgtgctttcattcctggaacccaaagacctgctacaagcagctcagacatgtcgctactggagaattttggctgaagacaaccttctctggagagagaaatgcaaagaagaggggattgatgaaccattgcacatcaagagaagaaaagtaataaaaccaggtttcatacacagtccatggaaaagtgcatacatcagacagcacagaattgatactaactcgaggcgaggaggcagcggcagcggcagcgatattgtgctgacccagagcccggcgagcctggcggtgagcctgggccagcgcgcgaccattagctgccgcgcgagcgaaagcgtggataactatggctttagctttatgaactggtttcagcagaaaccgggccagccgccgaaactgctgatttatgcgaccagcaaccgcggcagcggcgtgccggcgcgctttagcggcagcggcagcggcaccgattttagcctgaacattcatccggtggaagaagatgatagcgcgatgtatttttgccagcagaccaaagaagtgccgtggacctttggcggcggcaccaaactggaaattaaacgcggcggcggcggcagcggcggcggcgatagcggcggcggcggcagcgaagtgaaactggtggaaagcggcggcgatctggtgaaaccgggcggcagcctgaaactgagctgcgcggcgagcggctttacctttagccattatggcatgagctgggtgcgccagaccccggataaacgcctggaatgggtggcgaccattggcagccgcggcacctatacccattatccggatagcgtgaaaggccgctttaccattagccgcgataacgataaaaacgcgctgtatctgcagatgaacagcctgcgcaccgaagataccgcgatgtattattgcgcgcgcaaaagcgaattttattattatggcaacacctattattatagcgcgatggattattggggccagggcgcgagcgtgaccgtgagcagctaa

SEQ ID NO: 1317 - DNA, 1920 bp, synthetic construct
  source 1..1920: mol_type = other DNA; note = HA-FBXW7a-(GS)4-3DX.2 nucleic acid
atgtacccatacgatgttccagattacgctaatcaggaactgctctctgtgggcagcaaaagacgacgaactggaggctctctgagaggtaacccttcctcaagccaggtagatgaagaacagatgaatcgtgtggtagaggaggaacagcaacagcaactcagacaacaagaggaggagcacactgcaaggaatggtgaagttgttggagtagaacctagacctggaggccaaaatgattcccagcaaggacagttggaagaaaacaataatagatttatttcggtagatgaggactcctcaggaaaccaagaagaacaagaggaagatgaagaacatgctggtgaacaagatgaggaggatgaggaggaggaggagatggaccaggagagtgacgattttgatcagtctgatgatagtagcagagaagatgaacatacacatactaacagtgtcacgaactccagtagtattgtggacctgcccgttcaccaactctcctccccattctatacaaaaacaacaaaaatgaaaagaaagttggaccatggttctgaggtccgctctttttctttgggaaagaaaccatgcaaagtctcagaatatacaagtaccactgggcttgtaccatgttcagcaacaccaacaacttttggggacctcagagcagccaatggccaagggcaacaacgacgccgaattacatctgtccagccacctacaggcctccaggaatggctaaaaatgtttcagagctggagtggaccagagaaattgcttgctttagatgaactcattgatagttgtgaaccaacacaagtaaaacatatgatgcaagtgatagaaccccagtttcaacgagacttcatttcattgctccctaaagagttggcactctatgtgctttcattcctggaacccaaagacctgctacaagcagctcagacatgtcgctactggagaattttggctgaagacaaccttctctggagagagaaatgcaaagaagaggggattgatgaaccattgcacatcaagagaagaaaagtaataaaaccaggtttcatacacagtccatggaaaagtgcatacatcagacagcacagaattgatactaactcgaggcgaggaggcagcggcagcggcagcggcagcgatattgtgctgacccagagcccggcgagcctggcggtgagcctgggccagcgcgcgaccattagctgccgcgcgagcgaaagcgtggataactatggctttagctttatgaactggtttcagcagaaaccgggccagccgccgaaactgctgatttatgcgaccagcaaccgcggcagcggcgtgccggcgcgctttagcggcagcggcagcggcaccgattttagcctgaacattcatccggtggaagaagatgatagcgcgatgtatttttgccagcagaccaaagaagtgccgtggacctttggcggcggcaccaaactggaaattaaacgcggcggcggcggcagcggcggcggcgatagcggcggcggcggcagcgaagtgaaactggtggaaagcggcggcgatctggtgaaaccgggcggcagcctgaaactgagctgcgcggcgagcggctttacctttagccattatggcatgagctgggtgcgccagaccccggataaacgcctggaatgggtggcgaccattggcagccgcggcacctatacccattatccggatagcgtgaaaggccgctttaccattagccgcgataacgataaaaacgcgctgtatctgcagatgaacagcctgcgcaccgaagataccgcgatgtattattgcgcgcgcaaaagcgaattttattattatggcaacacctattattatagcgcgatggattattggggccagggcgcgagcgtgaccgtgagcagctaa

SEQ ID NO: 1318 - DNA, 1926 bp, synthetic construct
  source 1..1926: mol_type = other DNA; note = HA-FBXW7a-(GS)5-3DX.2 nucleic acid
atgtacccatacgatgttccagattacgctaatcaggaactgctctctgtgggcagcaaaagacgacgaactggaggctctctgagaggtaacccttcctcaagccaggtagatgaagaacagatgaatcgtgtggtagaggaggaacagcaacagcaactcagacaacaagaggaggagcacactgcaaggaatggtgaagttgttggagtagaacctagacctggaggccaaaatgattcccagcaaggacagttggaagaaaacaataatagatttatttcggtagatgaggactcctcaggaaaccaagaagaacaagaggaagatgaagaacatgctggtgaacaagatgaggaggatgaggaggaggaggagatggaccaggagagtgacgattttgatcagtctgatgatagtagcagagaagatgaacatacacatactaacagtgtcacgaactccagtagtattgtggacctgcccgttcaccaactctcctccccattctatacaaaaacaacaaaaatgaaaagaaagttggaccatggttctgaggtccgctctttttctttgggaaagaaaccatgcaaagtctcagaatatacaagtaccactgggcttgtaccatgttcagcaacaccaacaacttttggggacctcagagcagccaatggccaagggcaacaacgacgccgaattacatctgtccagccacctacaggcctccaggaatggctaaaaatgtttcagagctggagtggaccagagaaattgcttgctttagatgaactcattgatagttgtgaaccaacacaagtaaaacatatgatgcaagtgatagaaccccagtttcaacgagacttcatttcattgctccctaaagagttggcactctatgtgctttcattcctggaacccaaagacctgctacaagcagctcagacatgtcgctactggagaattttggctgaagacaaccttctctggagagagaaatgcaaagaagaggggattgatgaaccattgcacatcaagagaagaaaagtaataaaaccaggtttcatacacagtccatggaaaagtgcatacatcagacagcacagaattgatactaactcgaggcgaggaggcagcggcagcggcagcggcagcggcagcgatattgtgctgacccagagcccggcgagcctggcggtgagcctgggccagcgcgcgaccattagctgccgcgcgagcgaaagcgtggataactatggctttagctttatgaactggtttcagcagaaaccgggccagccgccgaaactgctgatttatgcgaccagcaaccgcggcagcggcgtgccggcgcgctttagcggcagcggcagcggcaccgattttagcctgaacattcatccggtggaagaagatgatagcgcgatgtatttttgccagcagaccaaagaagtgccgtggacctttggcggcggcaccaaactggaaattaaacgcggcggcggcggcagcggcggcggcgatagcggcggcggcggcagcgaagtgaaactggtggaaagcggcggcgatctggtgaaaccgggcggcagcctgaaactgagctgcgcggcgagcggctttacctttagccattatggcatgagctgggtgcgccagaccccggataaacgcctggaatgggtggcgaccattggcagccgcggcacctatacccattatccggatagcgtgaaaggccgctttaccattagccgcgataacgataaaaacgcgctgtatctgcagatgaacagcctgcgcaccgaagataccgcgatgtattattgcgcgcgcaaaagcgaattttattattatggcaacacctattattatagcgcgatggattattggggccagggcgcgagcgtgaccgtgagcagctaa

SEQ ID NO: 1319 - DNA, 1932 bp, synthetic construct
  source 1..1932: mol_type = other DNA; note = HA-FBXW7a-(GS)6-3DX.2 nucleic acid
atgtacccatacgatgttccagattacgctaatcaggaactgctctctgtgggcagcaaaagacgacgaactggaggctctctgagaggtaacccttcctcaagccaggtagatgaagaacagatgaatcgtgtggtagaggaggaacagcaacagcaactcagacaacaagaggaggagcacactgcaaggaatggtgaagttgttggagtagaacctagacctggaggccaaaatgattcccagcaaggacagttggaagaaaacaataatagatttatttcggtagatgaggactcctcaggaaaccaagaagaacaagaggaagatgaagaacatgctggtgaacaagatgaggaggatgaggaggaggaggagatggaccaggagagtgacgattttgatcagtctgatgatagtagcagagaagatgaacatacacatactaacagtgtcacgaactccagtagtattgtggacctgcccgttcaccaactctcctccccattctatacaaaaacaacaaaaatgaaaagaaagttggaccatggttctgaggtccgctctttttctttgggaaagaaaccatgcaaagtctcagaatatacaagtaccactgggcttgtaccatgttcagcaacaccaacaacttttggggacctcagagcagccaatggccaagggcaacaacgacgccgaattacatctgtccagccacctacaggcctccaggaatggctaaaaatgtttcagagctggagtggaccagagaaattgcttgctttagatgaactcattgatagttgtgaaccaacacaagtaaaacatatgatgcaagtgatagaaccccagtttcaacgagacttcatttcattgctccctaaagagttggcactctatgtgctttcattcctggaacccaaagacctgctacaagcagctcagacatgtcgctactggagaattttggctgaagacaaccttctctggagagagaaatgcaaagaagaggggattgatgaaccattgcacatcaagagaagaaaagtaataaaaccaggtttcatacacagtccatggaaaagtgcatacatcagacagcacagaattgatactaactcgaggcgaggaggcagcggcagcggcagcggcagcggcagcggcagcgatattgtgctgacccagagcccggcgagcctggcggtgagcctgggccagcgcgcgaccattagctgccgcgcgagcgaaagcgtggataactatggctttagctttatgaactggtttcagcagaaaccgggccagccgccgaaactgctgatttatgcgaccagcaaccgcggcagcggcgtgccggcgcgctttagcggcagcggcagcggcaccgattttagcctgaacattcatccggtggaagaagatgatagcgcgatgtatttttgccagcagaccaaagaagtgccgtggacctttggcggcggcaccaaactggaaattaaacgcggcggcggcggcagcggcggcggcgatagcggcggcggcggcagcgaagtgaaactggtggaaagcggcggcgatctggtgaaaccgggcggcagcctgaaactgagctgcgcggcgagcggctttacctttagccattatggcatgagctgggtgcgccagaccccggataaacgcctggaatgggtggcgaccattggcagccgcggcacctatacccattatccggatagcgtgaaaggccgctttaccattagccgcgataacgataaaaacgcgctgtatctgcagatgaacagcctgcgcaccgaagataccgcgatgtattattgcgcgcgcaaaagcgaattttattattatggcaacacctattattatagcgcgatggattattggggccagggcgcgagcgtgaccgtgagcagctaa

SEQ ID NO: 1320 - DNA, 1779 bp, synthetic construct
  source 1..1779: mol_type = other DNA; note = NLS-Keap1-(GS)1-3DX.2 nucleic acid
ccggcggcgaaacgcgtgaaactggatggcagcggcagcggcagccagccagatcccaggcctagcggggctggggcctgctgccgattcctgcccctgcagtcacagtgccctgagggggcaggggacgcggtgatgtacgcctccactgagtgcaaggcggaggtgacgccctcccagcatggcaaccgcaccttcagctacaccctggaggatcataccaagcaggcctttggcatcatgaacgagctgcggctcagccagcagctgtgtgacgtcacactgcaggtcaagtaccaggatgcaccggccgcccagttcatggcccacaaggtggtgctggcctcatccagccctgtcttcaaggccatgttcaccaacgggctgcgggagcagggcatggaggtggtgtccattgagggtatccaccccaaggtcatggagcgcctcattgaattcgcctacacggcctccatctccatgggcgagaagtgtgtcctccacgtcatgaacggtgctgtcatgtaccagatcgacagcgttgtccgtgcctgcagtgacttcctggtgcagcagctggaccccagcaatgccatcggcatcgccaacttcgctgagcagattggctgtgtggagttgcaccagcgtgcccgggagtacatctacatgcattttggggaggtggccaagcaagaggagttcttcaacctgtcccactgccaactggtgaccctcatcagccgggacgacctgaacgtgcgctgcgagtccgaggtcttccacgcctgcatcaactgggtcaagtacgactgcgaacagcgacggttctacgtccaggcgctgctgcgggccgtgcgctgccactcgttgacgccgaacttcctgcagatgcagctgcagaagtgcgagatcctgcagtccgactcccgctgcaaggactacctggtcaagatcttcgaggagctcaccctgcacaagcccacgcaggtgatgccctgccgggcgcccggcagcgatattgtgctgacccagagcccggcgagcctggcggtgagcctgggccagcgcgcgaccattagctgccgcgcgagcgaaagcgtggataactatggctttagctttatgaactggtttcagcagaaaccgggccagccgccgaaactgctgatttatgcgaccagcaaccgcggcagcggcgtgccggcgcgctttagcggcagcggcagcggcaccgattttagcctgaacattcatccggtggaagaagatgatagcgcgatgtatttttgccagcagaccaaagaagtgccgtggacctttggcggcggcaccaaactggaaattaaacgcggcggcggcggcagcggcggcggcgatagcggcggcggcggcagcgaagtgaaactggtggaaagcggcggcgatctggtgaaaccgggcggcagcctgaaactgagctgcgcggcgagcggctttacctttagccattatggcatgagctgggtgcgccagaccccggataaacgcctggaatgggtggcgaccattggcagccgcggcacctatacccattatccggatagcgtgaaaggccgctttaccattagccgcgataacgataaaaacgcgctgtatctgcagatgaacagcctgcgcaccgaagataccgcgatgtattattgcgcgcgcaaaagcgaattttattattatggcaacacctattattatagcgcgatggattattggggccagggcgcgagcgtgaccgtgagcagctaa

SEQ ID NO: 1321 - DNA, 1785 bp, synthetic construct
  source 1..1785: mol_type = other DNA; note = NLS-Keap1-(GS)2-3DX.2 nucleic acid
ccggcggcgaaacgcgtgaaactggatggcagcggcagcggcagccagccagatcccaggcctagcggggctggggcctgctgccgattcctgcccctgcagtcacagtgccctgagggggcaggggacgcggtgatgtacgcctccactgagtgcaaggcggaggtgacgccctcccagcatggcaaccgcaccttcagctacaccctggaggatcataccaagcaggcctttggcatcatgaacgagctgcggctcagccagcagctgtgtgacgtcacactgcaggtcaagtaccaggatgcaccggccgcccagttcatggcccacaaggtggtgctggcctcatccagccctgtcttcaaggccatgttcaccaacgggctgcgggagcagggcatggaggtggtgtccattgagggtatccaccccaaggtcatggagcgcctcattgaattcgcctacacggcctccatctccatgggcgagaagtgtgtcctccacgtcatgaacggtgctgtcatgtaccagatcgacagcgttgtccgtgcctgcagtgacttcctggtgcagcagctggaccccagcaatgccatcggcatcgccaacttcgctgagcagattggctgtgtggagttgcaccagcgtgcccgggagtacatctacatgcattttggggaggtggccaagcaagaggagttcttcaacctgtcccactgccaactggtgaccctcatcagccgggacgacctgaacgtgcgctgcgagtccgaggtcttccacgcctgcatcaactgggtcaagtacgactgcgaacagcgacggttctacgtccaggcgctgctgcgggccgtgcgctgccactcgttgacgccgaacttcctgcagatgcagctgcagaagtgcgagatcctgcagtccgactcccgctgcaaggactacctggtcaagatcttcgaggagctcaccctgcacaagcccacgcaggtgatgccctgccgggcgcccggcagcggcagcgatattgtgctgacccagagcccggcgagcctggcggtgagcctgggccagcgcgcgaccattagctgccgcgcgagcgaaagcgtggataactatggctttagctttatgaactggtttcagcagaaaccgggccagccgccgaaactgctgatttatgcgaccagcaaccgcggcagcggcgtgccggcgcgctttagcggcagcggcagcggcaccgattttagcctgaacattcatccggtggaagaagatgatagcgcgatgtatttttgccagcagaccaaagaagtgccgtggacctttggcggcggcaccaaactggaaattaaacgcggcggcggcggcagcggcggcggcgatagcggcggcggcggcagcgaagtgaaactggtggaaagcggcggcgatctggtgaaaccgggcggcagcctgaaactgagctgcgcggcgagcggctttacctttagccattatggcatgagctgggtgcgccagaccccggataaacgcctggaatgggtggcgaccattggcagccgcggcacctatacccattatccggatagcgtgaaaggccgctttaccattagccgcgataacgataaaaacgcgctgtatctgcagatgaacagcctgcgcaccgaagataccgcgatgtattattgcgcgcgcaaaagcgaattttattattatggcaacacctattattatagcgcgatggattattggggccagggcgcgagcgtgaccgtgagcagctaa

SEQ ID NO: 1322 - DNA, 1791 bp, synthetic construct
  source 1..1791: mol_type = other DNA; note = NLS-Keap1-(GS)3-3DX.2 nucleic acid
ccggcggcgaaacgcgtgaaactggatggcagcggcagcggcagccagccagatcccaggcctagcggggctggggcctgctgccgattcctgcccctgcagtcacagtgccctgagggggcaggggacgcggtgatgtacgcctccactgagtgcaaggcggaggtgacgccctcccagcatggcaaccgcaccttcagctacaccctggaggatcataccaagcaggcctttggcatcatgaacgagctgcggctcagccagcagctgtgtgacgtcacactgcaggtcaagtaccaggatgcaccggccgcccagttcatggcccacaaggtggtgctggcctcatccagccctgtcttcaaggccatgttcaccaacgggctgcgggagcagggcatggaggtggtgtccattgagggtatccaccccaaggtcatggagcgcctcattgaattcgcctacacggcctccatctccatgggcgagaagtgtgtcctccacgtcatgaacggtgctgtcatgtaccagatcgacagcgttgtccgtgcctgcagtgacttcctggtgcagcagctggaccccagcaatgccatcggcatcgccaacttcgctgagcagattggctgtgtggagttgcaccagcgtgcccgggagtacatctacatgcattttggggaggtggccaagcaagaggagttcttcaacctgtcccactgccaactggtgaccctcatcagccgggacgacctgaacgtgcgctgcgagtccgaggtcttccacgcctgcatcaactgggtcaagtacgactgcgaacagcgacggttctacgtccaggcgctgctgcgggccgtgcgctgccactcgttgacgccgaacttcctgcagatgcagctgcagaagtgcgagatcctgcagtccgactcccgctgcaaggactacctggtcaagatcttcgaggagctcaccctgcacaagcccacgcaggtgatgccctgccgggcgcccggcagcggcagcggcagcgatattgtgctgacccagagcccggcgagcctggcggtgagcctgggccagcgcgcgaccattagctgccgcgcgagcgaaagcgtggataactatggctttagctttatgaactggtttcagcagaaaccgggccagccgccgaaactgctgatttatgcgaccagcaaccgcggcagcggcgtgccggcgcgctttagcggcagcggcagcggcaccgattttagcctgaacattcatccggtggaagaagatgatagcgcgatgtatttttgccagcagaccaaagaagtgccgtggacctttggcggcggcaccaaactggaaattaaacgcggcggcggcggcagcggcggcggcgatagcggcggcggcggcagcgaagtgaaactggtggaaagcggcggcgatctggtgaaaccgggcggcagcctgaaactgagctgcgcggcgagcggctttacctttagccattatggcatgagctgggtgcgccagaccccggataaacgcctggaatgggtggcgaccattggcagccgcggcacctatacccattatccggatagcgtgaaaggccgctttaccattagccgcgataacgataaaaacgcgctgtatctgcagatgaacagcctgcgcaccgaagataccgcgatgtattattgcgcgcgcaaaagcgaattttattattatggcaacacctattattatagcgcgatggattattggggccagggcgcgagcgtgaccgtgagcagctaa

SEQ ID NO: 1323 - DNA, 1797 bp, synthetic construct
  source 1..1797: mol_type = other DNA; note = NLS-Keap1-(GS)4-3DX.2 nucleic acid
ccggcggcgaaacgcgtgaaactggatggcagcggcagcggcagccagccagatcccaggcctagcggggctggggcctgctgccgattcctgcccctgcagtcacagtgccctgagggggcaggggacgcggtgatgtacgcctccactgagtgcaaggcggaggtgacgccctcccagcatggcaaccgcaccttcagctacaccctggaggatcataccaagcaggcctttggcatcatgaacgagctgcggctcagccagcagctgtgtgacgtcacactgcaggtcaagtaccaggatgcaccggccgcccagttcatggcccacaaggtggtgctggcctcatccagccctgtcttcaaggccatgttcaccaacgggctgcgggagcagggcatggaggtggtgtccattgagggtatccaccccaaggtcatggagcgcctcattgaattcgcctacacggcctccatctccatgggcgagaagtgtgtcctccacgtcatgaacggtgctgtcatgtaccagatcgacagcgttgtccgtgcctgcagtgacttcctggtgcagcagctggaccccagcaatgccatcggcatcgccaacttcgctgagcagattggctgtgtggagttgcaccagcgtgcccgggagtacatctacatgcattttggggaggtggccaagcaagaggagttcttcaacctgtcccactgccaactggtgaccctcatcagccgggacgacctgaacgtgcgctgcgagtccgaggtcttccacgcctgcatcaactgggtcaagtacgactgcgaacagcgacggttctacgtccaggcgctgctgcgggccgtgcgctgccactcgttgacgccgaacttcctgcagatgcagctgcagaagtgcgagatcctgcagtccgactcccgctgcaaggactacctggtcaagatcttcgaggagctcaccctgcacaagcccacgcaggtgatgccctgccgggcgcccggcagcggcagcggcagcggcagcgatattgtgctgacccagagcccggcgagcctggcggtgagcctgggccagcgcgcgaccattagctgccgcgcgagcgaaagcgtggataactatggctttagctttatgaactggtttcagcagaaaccgggccagccgccgaaactgctgatttatgcgaccagcaaccgcggcagcggcgtgccggcgcgctttagcggcagcggcagcggcaccgattttagcctgaacattcatccggtggaagaagatgatagcgcgatgtatttttgccagcagaccaaagaagtgccgtggacctttggcggcggcaccaaactggaaattaaacgcggcggcggcggcagcggcggcggcgatagcggcggcggcggcagcgaagtgaaactggtggaaagcggcggcgatctggtgaaaccgggcggcagcctgaaactgagctgcgcggcgagcggctttacctttagccattatggcatgagctgggtgcgccagaccccggataaacgcctggaatgggtggcgaccattggcagccgcggcacctatacccattatccggatagcgtgaaaggccgctttaccattagccgcgataacgataaaaacgcgctgtatctgcagatgaacagcctgcgcaccgaagataccgcgatgtattattgcgcgcgcaaaagcgaattttattattatggcaacacctattattatagcgcgatggattattggggccagggcgcgagcgtgaccgtgagcagctaa

SEQ ID NO: 1324 - DNA, 1803 bp, synthetic construct
  source 1..1803: mol_type = other DNA; note = NLS-Keap1-(GS)5-3DX.2 nucleic acid
ccggcggcgaaacgcgtgaaactggatggcagcggcagcggcagccagccagatcccaggcctagcggggctggggcctgctgccgattcctgcccctgcagtcacagtgccctgagggggcaggggacgcggtgatgtacgcctccactgagtgcaaggcggaggtgacgccctcccagcatggcaaccgcaccttcagctacaccctggaggatcataccaagcaggcctttggcatcatgaacgagctgcggctcagccagcagctgtgtgacgtcacactgcaggtcaagtaccaggatgcaccggccgcccagttcatggcccacaaggtggtgctggcctcatccagccctgtcttcaaggccatgttcaccaacgggctgcgggagcagggcatggaggtggtgtccattgagggtatccaccccaaggtcatggagcgcctcattgaattcgcctacacggcctccatctccatgggcgagaagtgtgtcctccacgtcatgaacggtgctgtcatgtaccagatcgacagcgttgtccgtgcctgcagtgacttcctggtgcagcagctggaccccagcaatgccatcggcatcgccaacttcgctgagcagattggctgtgtggagttgcaccagcgtgcccgggagtacatctacatgcattttggggaggtggccaagcaagaggagttcttcaacctgtcccactgccaactggtgaccctcatcagccgggacgacctgaacgtgcgctgcgagtccgaggtcttccacgcctgcatcaactgggtcaagtacgactgcgaacagcgacggttctacgtccaggcgctgctgcgggccgtgcgctgccactcgttgacgccgaacttcctgcagatgcagctgcagaagtgcgagatcctgcagtccgactcccgctgcaaggactacctggtcaagatcttcgaggagctcaccctgcacaagcccacgcaggtgatgccctgccgggcgcccggcagcggcagcggcagcggcagcggcagcgatattgtgctgacccagagcccggcgagcctggcggtgagcctgggccagcgcgcgaccattagctgccgcgcgagcgaaagcgtggataactatggctttagctttatgaactggtttcagcagaaaccgggccagccgccgaaactgctgatttatgcgaccagcaaccgcggcagcggcgtgccggcgcgctttagcggcagcggcagcggcaccgattttagcctgaacattcatccggtggaagaagatgatagcgcgatgtatttttgccagcagaccaaagaagtgccgtggacctttggcggcggcaccaaactggaaattaaacgcggcggcggcggcagcggcggcggcgatagcggcggcggcggcagcgaagtgaaactggtggaaagcggcggcgatctggtgaaaccgggcggcagcctgaaactgagctgcgcggcgagcggctttacctttagccattatggcatgagctgggtgcgccagaccccggataaacgcctggaatgggtggcgaccattggcagccgcggcacctatacccattatccggatagcgtgaaaggccgctttaccattagccgcgataacgataaaaacgcgctgtatctgcagatgaacagcctgcgcaccgaagataccgcgatgtattattgcgcgcgcaaaagcgaattttattattatggcaacacctattattatagcgcgatggattattggggccagggcgcgagcgtgaccgtgagcagctaa

SEQ ID NO: 1325 - DNA, 1809 bp, synthetic construct
  source 1..1809: mol_type = other DNA; note = NLS-Keap1-(GS)6-3DX.2 nucleic acid
ccggcggcgaaacgcgtgaaactggatggcagcggcagcggcagccagccagatcccaggcctagcggggctggggcctgctgccgattcctgcccctgcagtcacagtgccctgagggggcaggggacgcggtgatgtacgcctccactgagtgcaaggcggaggtgacgccctcccagcatggcaaccgcaccttcagctacaccctggaggatcataccaagcaggcctttggcatcatgaacgagctgcggctcagccagcagctgtgtgacgtcacactgcaggtcaagtaccaggatgcaccggccgcccagttcatggcccacaaggtggtgctggcctcatccagccctgtcttcaaggccatgttcaccaacgggctgcgggagcagggcatggaggtggtgtccattgagggtatccaccccaaggtcatggagcgcctcattgaattcgcctacacggcctccatctccatgggcgagaagtgtgtcctccacgtcatgaacggtgctgtcatgtaccagatcgacagcgttgtccgtgcctgcagtgacttcctggtgcagcagctggaccccagcaatgccatcggcatcgccaacttcgctgagcagattggctgtgtggagttgcaccagcgtgcccgggagtacatctacatgcattttggggaggtggccaagcaagaggagttcttcaacctgtcccactgccaactggtgaccctcatcagccgggacgacctgaacgtgcgctgcgagtccgaggtcttccacgcctgcatcaactgggtcaagtacgactgcgaacagcgacggttctacgtccaggcgctgctgcgggccgtgcgctgccactcgttgacgccgaacttcctgcagatgcagctgcagaagtgcgagatcctgcagtccgactcccgctgcaaggactacctggtcaagatcttcgaggagctcaccctgcacaagcccacgcaggtgatgccctgccgggcgcccggcagcggcagcggcagcggcagcggcagcggcagcgatattgtgctgacccagagcccggcgagcctggcggtgagcctgggccagcgcgcgaccattagctgccgcgcgagcgaaagcgtggataactatggctttagctttatgaactggtttcagcagaaaccgggccagccgccgaaactgctgatttatgcgaccagcaaccgcggcagcggcgtgccggcgcgctttagcggcagcggcagcggcaccgattttagcctgaacattcatccggtggaagaagatgatagcgcgatgtatttttgccagcagaccaaagaagtgccgtggacctttggcggcggcaccaaactggaaattaaacgcggcggcggcggcagcggcggcggcgatagcggcggcggcggcagcgaagtgaaactggtggaaagcggcggcgatctggtgaaaccgggcggcagcctgaaactgagctgcgcggcgagcggctttacctttagccattatggcatgagctgggtgcgccagaccccggataaacgcctggaatgggtggcgaccattggcagccgcggcacctatacccattatccggatagcgtgaaaggccgctttaccattagccgcgataacgataaaaacgcgctgtatctgcagatgaacagcctgcgcaccgaagataccgcgatgtattattgcgcgcgcaaaagcgaattttattattatggcaacacctattattatagcgcgatggattattggggccagggcgcgagcgtgaccgtgagcagctaa

SEQ ID NO: 1326 - DNA, 1809 bp, synthetic construct
  source 1..1809: mol_type = other DNA; note = HA-NLS-Keap1-(GS)1-3DX.2 nucleic acid
atgtacccatacgatgttccagattacgctccggcggcgaaacgcgtgaaactggatggcagcggcagcggcagccagccagatcccaggcctagcggggctggggcctgctgccgattcctgcccctgcagtcacagtgccctgagggggcaggggacgcggtgatgtacgcctccactgagtgcaaggcggaggtgacgccctcccagcatggcaaccgcaccttcagctacaccctggaggatcataccaagcaggcctttggcatcatgaacgagctgcggctcagccagcagctgtgtgacgtcacactgcaggtcaagtaccaggatgcaccggccgcccagttcatggcccacaaggtggtgctggcctcatccagccctgtcttcaaggccatgttcaccaacgggctgcgggagcagggcatggaggtggtgtccattgagggtatccaccccaaggtcatggagcgcctcattgaattcgcctacacggcctccatctccatgggcgagaagtgtgtcctccacgtcatgaacggtgctgtcatgtaccagatcgacagcgttgtccgtgcctgcagtgacttcctggtgcagcagctggaccccagcaatgccatcggcatcgccaacttcgctgagcagattggctgtgtggagttgcaccagcgtgcccgggagtacatctacatgcattttggggaggtggccaagcaagaggagttcttcaacctgtcccactgccaactggtgaccctcatcagccgggacgacctgaacgtgcgctgcgagtccgaggtcttccacgcctgcatcaactgggtcaagtacgactgcgaacagcgacggttctacgtccaggcgctgctgcgggccgtgcgctgccactcgttgacgccgaacttcctgcagatgcagctgcagaagtgcgagatcctgcagtccgactcccgctgcaaggactacctggtcaagatcttcgaggagctcaccctgcacaagcccacgcaggtgatgccctgccgggcgcccggcagcgatattgtgctgacccagagcccggcgagcctggcggtgagcctgggccagcgcgcgaccattagctgccgcgcgagcgaaagcgtggataactatggctttagctttatgaactggtttcagcagaaaccgggccagccgccgaaactgctgatttatgcgaccagcaaccgcggcagcggcgtgccggcgcgctttagcggcagcggcagcggcaccgattttagcctgaacattcatccggtggaagaagatgatagcgcgatgtatttttgccagcagaccaaagaagtgccgtggacctttggcggcggcaccaaactggaaattaaacgcggcggcggcggcagcggcggcggcgatagcggcggcggcggcagcgaagtgaaactggtggaaagcggcggcgatctggtgaaaccgggcggcagcctgaaactgagctgcgcggcgagcggctttacctttagccattatggcatgagctgggtgcgccagaccccggataaacgcctggaatgggtggcgaccattggcagccgcggcacctatacccattatccggatagcgtgaaaggccgctttaccattagccgcgataacgataaaaacgcgctgtatctgcagatgaacagcctgcgcaccgaagataccgcgatgtattattgcgcgcgcaaaagcgaattttattattatggcaacacctattattatagcgcgatggattattggggccagggcgcgagcgtgaccgtgagcagctaa

SEQ ID NO: 1327 - DNA, 1815 bp, synthetic construct
  source 1..1815: mol_type = other DNA; note = HA-NLS-Keap1-(GS)2-3DX.2 nucleic acid
atgtacccatacgatgttccagattacgctccggcggcgaaacgcgtgaaactggatggcagcggcagcggcagccagccagatcccaggcctagcggggctggggcctgctgccgattcctgcccctgcagtcacagtgccctgagggggcaggggacgcggtgatgtacgcctccactgagtgcaaggcggaggtgacgccctcccagcatggcaaccgcaccttcagctacaccctggaggatcataccaagcaggcctttggcatcatgaacgagctgcggctcagccagcagctgtgtgacgtcacactgcaggtcaagtaccaggatgcaccggccgcccagttcatggcccacaaggtggtgctggcctcatccagccctgtcttcaaggccatgttcaccaacgggctgcgggagcagggcatggaggtggtgtccattgagggtatccaccccaaggtcatggagcgcctcattgaattcgcctacacggcctccatctccatgggcgagaagtgtgtcctccacgtcatgaacggtgctgtcatgtaccagatcgacagcgttgtccgtgcctgcagtgacttcctggtgcagcagctggaccccagcaatgccatcggcatcgccaacttcgctgagcagattggctgtgtggagttgcaccagcgtgcccgggagtacatctacatgcattttggggaggtggccaagcaagaggagttcttcaacctgtcccactgccaactggtgaccctcatcagccgggacgacctgaacgtgcgctgcgagtccgaggtcttccacgcctgcatcaactgggtcaagtacgactgcgaacagcgacggttctacgtccaggcgctgctgcgggccgtgcgctgccactcgttgacgccgaacttcctgcagatgcagctgcagaagtgcgagatcctgcagtccgactcccgctgcaaggactacctggtcaagatcttcgaggagctcaccctgcacaagcccacgcaggtgatgccctgccgggcgcccggcagcggcagcgatattgtgctgacccagagcccggcgagcctggcggtgagcctgggccagcgcgcgaccattagctgccgcgcgagcgaaagcgtggataactatggctttagctttatgaactggtttcagcagaaaccgggccagccgccgaaactgctgatttatgcgaccagcaaccgcggcagcggcgtgccggcgcgctttagcggcagcggcagcggcaccgattttagcctgaacattcatccggtggaagaagatgatagcgcgatgtatttttgccagcagaccaaagaagtgccgtggacctttggcggcggcaccaaactggaaattaaacgcggcggcggcggcagcggcggcggcgatagcggcggcggcggcagcgaagtgaaactggtggaaagcggcggcgatctggtgaaaccgggcggcagcctgaaactgagctgcgcggcgagcggctttacctttagccattatggcatgagctgggtgcgccagaccccggataaacgcctggaatgggtggcgaccattggcagccgcggcacctatacccattatccggatagcgtgaaaggccgctttaccattagccgcgataacgataaaaacgcgctgtatctgcagatgaacagcctgcgcaccgaagataccgcgatgtattattgcgcgcgcaaaagcgaattttattattatggcaacacctattattatagcgcgatggattattggggccagggcgcgagcgtgaccgtgagcagctaa

SEQ ID NO: 1328 - DNA, 1821 bp, synthetic construct
  source 1..1821: mol_type = other DNA; note = HA-NLS-Keap1-(GS)3-3DX.2 nucleic acid
atgtacccatacgatgttccagattacgctccggcggcgaaacgcgtgaaactggatggcagcggcagcggcagccagccagatcccaggcctagcggggctggggcctgctgccgattcctgcccctgcagtcacagtgccctgagggggcaggggacgcggtgatgtacgcctccactgagtgcaaggcggaggtgacgccctcccagcatggcaaccgcaccttcagctacaccctggaggatcataccaagcaggcctttggcatcatgaacgagctgcggctcagccagcagctgtgtgacgtcacactgcaggtcaagtaccaggatgcaccggccgcccagttcatggcccacaaggtggtgctggcctcatccagccctgtcttcaaggccatgttcaccaacgggctgcgggagcagggcatggaggtggtgtccattgagggtatccaccccaaggtcatggagcgcctcattgaattcgcctacacggcctccatctccatgggcgagaagtgtgtcctccacgtcatgaacggtgctgtcatgtaccagatcgacagcgttgtccgtgcctgcagtgacttcctggtgcagcagctggaccccagcaatgccatcggcatcgccaacttcgctgagcagattggctgtgtggagttgcaccagcgtgcccgggagtacatctacatgcattttggggaggtggccaagcaagaggagttcttcaacctgtcccactgccaactggtgaccctcatcagccgggacgacctgaacgtgcgctgcgagtccgaggtcttccacgcctgcatcaactgggtcaagtacgactgcgaacagcgacggttctacgtccaggcgctgctgcgggccgtgcgctgccactcgttgacgccgaacttcctgcagatgcagctgcagaagtgcgagatcctgcagtccgactcccgctgcaaggactacctggtcaagatcttcgaggagctcaccctgcacaagcccacgcaggtgatgccctgccgggcgcccggcagcggcagcggcagcgatattgtgctgacccagagcccggcgagcctggcggtgagcctgggccagcgcgcgaccattagctgccgcgcgagcgaaagcgtggataactatggctttagctttatgaactggtttcagcagaaaccgggccagccgccgaaactgctgatttatgcgaccagcaaccgcggcagcggcgtgccggcgcgctttagcggcagcggcagcggcaccgattttagcctgaacattcatccggtggaagaagatgatagcgcgatgtatttttgccagcagaccaaagaagtgccgtggacctttggcggcggcaccaaactggaaattaaacgcggcggcggcggcagcggcggcggcgatagcggcggcggcggcagcgaagtgaaactggtggaaagcggcggcgatctggtgaaaccgggcggcagcctgaaactgagctgcgcggcgagcggctttacctttagccattatggcatgagctgggtgcgccagaccccggataaacgcctggaatgggtggcgaccattggcagccgcggcacctatacccattatccggatagcgtgaaaggccgctttaccattagccgcgataacgataaaaacgcgctgtatctgcagatgaacagcctgcgcaccgaagataccgcgatgtattattgcgcgcgcaaaagcgaattttattattatggcaacacctattattatagcgcgatggattattggggccagggcgcgagcgtgaccgtgagcagctaa

SEQ ID NO: 1329 - DNA, 1827 bp, synthetic construct
  source 1..1827: mol_type = other DNA; note = HA-NLS-Keap1-(GS)4-3DX.2 nucleic acid
atgtacccatacgatgttccagattacgctccggcggcgaaacgcgtgaaactggatggcagcggcagcggcagccagccagatcccaggcctagcggggctggggcctgctgccgattcctgcccctgcagtcacagtgccctgagggggcaggggacgcggtgatgtacgcctccactgagtgcaaggcggaggtgacgccctcccagcatggcaaccgcaccttcagctacaccctggaggatcataccaagcaggcctttggcatcatgaacgagctgcggctcagccagcagctgtgtgacgtcacactgcaggtcaagtaccaggatgcaccggccgcccagttcatggcccacaaggtggtgctggcctcatccagccctgtcttcaaggccatgttcaccaacgggctgcgggagcagggcatggaggtggtgtccattgagggtatccaccccaaggtcatggagcgcctcattgaattcgcctacacggcctccatctccatgggcgagaagtgtgtcctccacgtcatgaacggtgctgtcatgtaccagatcgacagcgttgtccgtgcctgcagtgacttcctggtgcagcagctggaccccagcaatgccatcggcatcgccaacttcgctgagcagattggctgtgtggagttgcaccagcgtgcccgggagtacatctacatgcattttggggaggtggccaagcaagaggagttcttcaacctgtcccactgccaactggtgaccctcatcagccgggacgacctgaacgtgcgctgcgagtccgaggtcttccacgcctgcatcaactgggtcaagtacgactgcgaacagcgacggttctacgtccaggcgctgctgcgggccgtgcgctgccactcgttgacgccgaacttcctgcagatgcagctgcagaagtgcgagatcctgcagtccgactcccgctgcaaggactacctggtcaagatcttcgaggagctcaccctgcacaagcccacgcaggtgatgccctgccgggcgcccggcagcggcagcggcagcggcagcgatattgtgctgacccagagcccggcgagcctggcggtgagcctgggccagcgcgcgaccattagctgccgcgcgagcgaaagcgtggataactatggctttagctttatgaactggtttcagcagaaaccgggccagccgccgaaactgctgatttatgcgaccagcaaccgcggcagcggcgtgccggcgcgctttagcggcagcggcagcggcaccgattttagcctgaacattcatccggtggaagaagatgatagcgcgatgtatttttgccagcagaccaaagaagtgccgtggacctttggcggcggcaccaaactggaaattaaacgcggcggcggcggcagcggcggcggcgatagcggcggcggcggcagcgaagtgaaactggtggaaagcggcggcgatctggtgaaaccgggcggcagcctgaaactgagctgcgcggcgagcggctttacctttagccattatggcatgagctgggtgcgccagaccccggataaacgcctggaatgggtggcgaccattggcagccgcggcacctatacccattatccggatagcgtgaaaggccgctttaccattagccgcgataacgataaaaacgcgctgtatctgcagatgaacagcctgcgcaccgaagataccgcgatgtattattgcgcgcgcaaaagcgaattttattattatggcaacacctattattatagcgcgatggattattggggccagggcgcgagcgtgaccgtgagcagctaa

SEQ ID NO: 1330 - DNA, 1833 bp, synthetic construct
  source 1..1833: mol_type = other DNA; note = HA-NLS-Keap1-(GS)5-3DX.2 nucleic acid
atgtacccatacgatgttccagattacgctccggcggcgaaacgcgtgaaactggatggcagcggcagcggcagccagccagatcccaggcctagcggggctggggcctgctgccgattcctgcccctgcagtcacagtgccctgagggggcaggggacgcggtgatgtacgcctccactgagtgcaaggcggaggtgacgccctcccagcatggcaaccgcaccttcagctacaccctggaggatcataccaagcaggcctttggcatcatgaacgagctgcggctcagccagcagctgtgtgacgtcacactgcaggtcaagtaccaggatgcaccggccgcccagttcatggcccacaaggtggtgctggcctcatccagccctgtcttcaaggccatgttcaccaacgggctgcgggagcagggcatggaggtggtgtccattgagggtatccaccccaaggtcatggagcgcctcattgaattcgcctacacggcctccatctccatgggcgagaagtgtgtcctccacgtcatgaacggtgctgtcatgtaccagatcgacagcgttgtccgtgcctgcagtgacttcctggtgcagcagctggaccccagcaatgccatcggcatcgccaacttcgctgagcagattggctgtgtggagttgcaccagcgtgcccgggagtacatctacatgcattttggggaggtggccaagcaagaggagttcttcaacctgtcccactgccaactggtgaccctcatcagccgggacgacctgaacgtgcgctgcgagtccgaggtcttccacgcctgcatcaactgggtcaagtacgactgcgaacagcgacggttctacgtccaggcgctgctgcgggccgtgcgctgccactcgttgacgccgaacttcctgcagatgcagctgcagaagtgcgagatcctgcagtccgactcccgctgcaaggactacctggtcaagatcttcgaggagctcaccctgcacaagcccacgcaggtgatgccctgccgggcgcccggcagcggcagcggcagcggcagcggcagcgatattgtgctgacccagagcccggcgagcctggcggtgagcctgggccagcgcgcgaccattagctgccgcgcgagcgaaagcgtggataactatggctttagctttatgaactggtttcagcagaaaccgggccagccgccgaaactgctgatttatgcgaccagcaaccgcggcagcggcgtgccggcgcgctttagcggcagcggcagcggcaccgattttagcctgaacattcatccggtggaagaagatgatagcgcgatgtatttttgccagcagaccaaagaagtgccgtggacctttggcggcggcaccaaactggaaattaaacgcggcggcggcggcagcggcggcggcgatagcggcggcggcggcagcgaagtgaaactggtggaaagcggcggcgatctggtgaaaccgggcggcagcctgaaactgagctgcgcggcgagcggctttacctttagccattatggcatgagctgggtgcgccagaccccggataaacgcctggaatgggtggcgaccattggcagccgcggcacctatacccattatccggatagcgtgaaaggccgctttaccattagccgcgataacgataaaaacgcgctgtatctgcagatgaacagcctgcgcaccgaagataccgcgatgtattattgcgcgcgcaaaagcgaattttattattatggcaacacctattattatagcgcgatggattattggggccagggcgcgagcgtgaccgtgagcagctaa

SEQ ID NO: 1331 - DNA, 1839 bp, synthetic construct
  source 1..1839: mol_type = other DNA; note = HA-NLS-Keap1-(GS)6-3DX.2 nucleic acid
atgtacccatacgatgttccagattacgctccggcggcgaaacgcgtgaaactggatggcagcggcagcggcagccagccagatcccaggcctagcggggctggggcctgctgccgattcctgcccctgcagtcacagtgccctgagggggcaggggacgcggtgatgtacgcctccactgagtgcaaggcggaggtgacgccctcccagcatggcaaccgcaccttcagctacaccctggaggatcataccaagcaggcctttggcatcatgaacgagctgcggctcagccagcagctgtgtgacgtcacactgcaggtcaagtaccaggatgcaccggccgcccagttcatggcccacaaggtggtgctggcctcatccagccctgtcttcaaggccatgttcaccaacgggctgcgggagcagggcatggaggtggtgtccattgagggtatccaccccaaggtcatggagcgcctcattgaattcgcctacacggcctccatctccatgggcgagaagtgtgtcctccacgtcatgaacggtgctgtcatgtaccagatcgacagcgttgtccgtgcctgcagtgacttcctggtgcagcagctggaccccagcaatgccatcggcatcgccaacttcgctgagcagattggctgtgtggagttgcaccagcgtgcccgggagtacatctacatgcattttggggaggtggccaagcaagaggagttcttcaacctgtcccactgccaactggtgaccctcatcagccgggacgacctgaacgtgcgctgcgagtccgaggtcttccacgcctgcatcaactgggtcaagtacgactgcgaacagcgacggttctacgtccaggcgctgctgcgggccgtgcgctgccactcgttgacgccgaacttcctgcagatgcagctgcagaagtgcgagatcctgcagtccgactcccgctgcaaggactacctggtcaagatcttcgaggagctcaccctgcacaagcccacgcaggtgatgccctgccgggcgcccggcagcggcagcggcagcggcagcggcagcggcagcgatattgtgctgacccagagcccggcgagcctggcggtgagcctgggccagcgcgcgaccattagctgccgcgcgagcgaaagcgtggataactatggctttagctttatgaactggtttcagcagaaaccgggccagccgccgaaactgctgatttatgcgaccagcaaccgcggcagcggcgtgccggcgcgctttagcggcagcggcagcggcaccgattttagcctgaacattcatccggtggaagaagatgatagcgcgatgtatttttgccagcagaccaaagaagtgccgtggacctttggcggcggcaccaaactggaaattaaacgcggcggcggcggcagcggcggcggcgatagcggcggcggcggcagcgaagtgaaactggtggaaagcggcggcgatctggtgaaaccgggcggcagcctgaaactgagctgcgcggcgagcggctttacctttagccattatggcatgagctgggtgcgccagaccccggataaacgcctggaatgggtggcgaccattggcagccgcggcacctatacccattatccggatagcgtgaaaggccgctttaccattagccgcgataacgataaaaacgcgctgtatctgcagatgaacagcctgcgcaccgaagataccgcgatgtattattgcgcgcgcaaaagcgaattttattattatggcaacacctattattatagcgcgatggattattggggccagggcgcgagcgtgaccgtgagcagctaa

SEQ ID NO: 1332 - DNA, 1197 bp, synthetic construct
  source 1..1197: mol_type = other DNA; note = NLS-RNF125-(GS)1-3DX.2 nucleic acid
ccggcggcgaaacgcgtgaaactggatggcagcggcagcggcagcggctccgtgctgagcaccgacagcggcaaatcggcgcccgcctctgccaccgcgcgggccctggagcgcaggagggacccggagttgcccgtcacgtccttcgactgcgccgtgtgccttgaggtgttacaccagcctgtccggacccgctgcggccacgtattctgccgttcctgtattgctaccagtctgaagaacaacaagtggacctgtccttattgccgggcatatcttccttcagaaggagttccagcaactgatgtagccaaaagaatgaaatcagagtataagaactgcgctgagtgtgacaccctggtttgcctcagtgaaatgagggcacatattcggacttgtcagaagtacatagataagtatggaccaggcagcgatattgtgctgacccagagcccggcgagcctggcggtgagcctgggccagcgcgcgaccattagctgccgcgcgagcgaaagcgtggataactatggctttagctttatgaactggtttcagcagaaaccgggccagccgccgaaactgctgatttatgcgaccagcaaccgcggcagcggcgtgccggcgcgctttagcggcagcggcagcggcaccgattttagcctgaacattcatccggtggaagaagatgatagcgcgatgtatttttgccagcagaccaaagaagtgccgtggacctttggcggcggcaccaaactggaaattaaacgcggcggcggcggcagcggcggcggcgatagcggcggcggcggcagcgaagtgaaactggtggaaagcggcggcgatctggtgaaaccgggcggcagcctgaaactgagctgcgcggcgagcggctttacctttagccattatggcatgagctgggtgcgccagaccccggataaacgcctggaatgggtggcgaccattggcagccgcggcacctatacccattatccggatagcgtgaaaggccgctttaccattagccgcgataacgataaaaacgcgctgtatctgcagatgaacagcctgcgcaccgaagataccgcgatgtattattgcgcgcgcaaaagcgaattttattattatggcaacacctattattatagcgcgatggattattggggccagggcgcgagcgtgaccgtgagcagctaa

SEQ ID NO: 1333 - DNA, 1203 bp, synthetic construct
  source 1..1203: mol_type = other DNA; note = NLS-RNF125-(GS)2-3DX.2 nucleic acid
ccggcggcgaaacgcgtgaaactggatggcagcggcagcggcagcggctccgtgctgagcaccgacagcggcaaatcggcgcccgcctctgccaccgcgcgggccctggagcgcaggagggacccggagttgcccgtcacgtccttcgactgcgccgtgtgccttgaggtgttacaccagcctgtccggacccgctgcggccacgtattctgccgttcctgtattgctaccagtctgaagaacaacaagtggacctgtccttattgccgggcatatcttccttcagaaggagttccagcaactgatgtagccaaaagaatgaaatcagagtataagaactgcgctgagtgtgacaccctggtttgcctcagtgaaatgagggcacatattcggacttgtcagaagtacatagataagtatggaccaggcagcggcagcgatattgtgctgacccagagcccggcgagcctggcggtgagcctgggccagcgcgcgaccattagctgccgcgcgagcgaaagcgtggataactatggctttagctttatgaactggtttcagcagaaaccgggccagccgccgaaactgctgatttatgcgaccagcaaccgcggcagcggcgtgccggcgcgctttagcggcagcggcagcggcaccgattttagcctgaacattcatccggtggaagaagatgatagcgcgatgtatttttgccagcagaccaaagaagtgccgtggacctttggcggcggcaccaaactggaaattaaacgcggcggcggcggcagcggcggcggcgatagcggcggcggcggcagcgaagtgaaactggtggaaagcggcggcgatctggtgaaaccgggcggcagcctgaaactgagctgcgcggcgagcggctttacctttagccattatggcatgagctgggtgcgccagaccccggataaacgcctggaatgggtggcgaccattggcagccgcggcacctatacccattatccggatagcgtgaaaggccgctttaccattagccgcgataacgataaaaacgcgctgtatctgcagatgaacagcctgcgcaccgaagataccgcgatgtattattgcgcgcgcaaaagcgaattttattattatggcaacacctattattatagcgcgatggattattggggccagggcgcgagcgtgaccgtgagcagctaa

SEQ ID NO: 1334 - DNA, 1209 bp, synthetic construct
  source 1..1209: mol_type = other DNA; note = NLS-RNF125-(GS)3-3DX.2 nucleic acid
ccggcggcgaaacgcgtgaaactggatggcagcggcagcggcagcggctccgtgctgagcaccgacagcggcaaatcggcgcccgcctctgccaccgcgcgggccctggagcgcaggagggacccggagttgcccgtcacgtccttcgactgcgccgtgtgccttgaggtgttacaccagcctgtccggacccgctgcggccacgtattctgccgttcctgtattgctaccagtctgaagaacaacaagtggacctgtccttattgccgggcatatcttccttcagaaggagttccagcaactgatgtagccaaaagaatgaaatcagagtataagaactgcgctgagtgtgacaccctggtttgcctcagtgaaatgagggcacatattcggacttgtcagaagtacatagataagtatggaccaggcagcggcagcggcagcgatattgtgctgacccagagcccggcgagcctggcggtgagcctgggccagcgcgcgaccattagctgccgcgcgagcgaaagcgtggataactatggctttagctttatgaactggtttcagcagaaaccgggccagccgccgaaactgctgatttatgcgaccagcaaccgcggcagcggcgtgccggcgcgctttagcggcagcggcagcggcaccgattttagcctgaacattcatccggtggaagaagatgatagcgcgatgtatttttgccagcagaccaaagaagtgccgtggacctttggcggcggcaccaaactggaaattaaacgcggcggcggcggcagcggcggcggcgatagcggcggcggcggcagcgaagtgaaactggtggaaagcggcggcgatctggtgaaaccgggcggcagcctgaaactgagctgcgcggcgagcggctttacctttagccattatggcatgagctgggtgcgccagaccccggataaacgcctggaatgggtggcgaccattggcagccgcggcacctatacccattatccggatagcgtgaaaggccgctttaccattagccgcgataacgataaaaacgcgctgtatctgcagatgaacagcctgcgcaccgaagataccgcgatgtattattgcgcgcgcaaaagcgaattttattattatggcaacacctattattatagcgcgatggattattggggccagggcgcgagcgtgaccgtgagcagctaa

SEQ ID NO: 1335 - DNA, 1215 bp, synthetic construct
  source 1..1215: mol_type = other DNA; note = NLS-RNF125-(GS)4-3DX.2 nucleic acid
ccggcggcgaaacgcgtgaaactggatggcagcggcagcggcagcggctccgtgctgagcaccgacagcggcaaatcggcgcccgcctctgccaccgcgcgggccctggagcgcaggagggacccggagttgcccgtcacgtccttcgactgcgccgtgtgccttgaggtgttacaccagcctgtccggacccgctgcggccacgtattctgccgttcctgtattgctaccagtctgaagaacaacaagtggacctgtccttattgccgggcatatcttccttcagaaggagttccagcaactgatgtagccaaaagaatgaaatcagagtataagaactgcgctgagtgtgacaccctggtttgcctcagtgaaatgagggcacatattcggacttgtcagaagtacatagataagtatggaccaggcagcggcagcggcagcggcagcgatattgtgctgacccagagcccggcgagcctggcggtgagcctgggccagcgcgcgaccattagctgccgcgcgagcgaaagcgtggataactatggctttagctttatgaactggtttcagcagaaaccgggccagccgccgaaactgctgatttatgcgaccagcaaccgcggcagcggcgtgccggcgcgctttagcggcagcggcagcggcaccgattttagcctgaacattcatccggtggaagaagatgatagcgcgatgtatttttgccagcagaccaaagaagtgccgtggacctttggcggcggcaccaaactggaaattaaacgcggcggcggcggcagcggcggcggcgatagcggcggcggcggcagcgaagtgaaactggtggaaagcggcggcgatctggtgaaaccgggcggcagcctgaaactgagctgcgcggcgagcggctttacctttagccattatggcatgagctgggtgcgccagaccccggataaacgcctggaatgggtggcgaccattggcagccgcggcacctatacccattatccggatagcgtgaaaggccgctttaccattagccgcgataacgataaaaacgcgctgtatctgcagatgaacagcctgcgcaccgaagataccgcgatgtattattgcgcgcgcaaaagcgaattttattattatggcaacacctattattatagcgcgatggattattggggccagggcgcgagcgtgaccgtgagcagctaa

SEQ ID NO: 1336 - DNA, 1221 bp, synthetic construct
  source 1..1221: mol_type = other DNA; note = NLS-RNF125-(GS)5-3DX.2 nucleic acid
ccggcggcgaaacgcgtgaaactggatggcagcggcagcggcagcggctccgtgctgagcaccgacagcggcaaatcggcgcccgcctctgccaccgcgcgggccctggagcgcaggagggacccggagttgcccgtcacgtccttcgactgcgccgtgtgccttgaggtgttacaccagcctgtccggacccgctgcggccacgtattctgccgttcctgtattgctaccagtctgaagaacaacaagtggacctgtccttattgccgggcatatcttccttcagaaggagttccagcaactgatgtagccaaaagaatgaaatcagagtataagaactgcgctgagtgtgacaccctggtttgcctcagtgaaatgagggcacatattcggacttgtcagaagtacatagataagtatggaccaggcagcggcagcggcagcggcagcggcagcgatattgtgctgacccagagcccggcgagcctggcggtgagcctgggccagcgcgcgaccattagctgccgcgcgagcgaaagcgtggataactatggctttagctttatgaactggtttcagcagaaaccgggccagccgccgaaactgctgatttatgcgaccagcaaccgcggcagcggcgtgccggcgcgctttagcggcagcggcagcggcaccgattttagcctgaacattcatccggtggaagaagatgatagcgcgatgtatttttgccagcagaccaaagaagtgccgtggacctttggcggcggcaccaaactggaaattaaacgcggcggcggcggcagcggcggcggcgatagcggcggcggcggcagcgaagtgaaactggtggaaagcggcggcgatctggtgaaaccgggcggcagcctgaaactgagctgcgcggcgagcggctttacctttagccattatggcatgagctgggtgcgccagaccccggataaacgcctggaatgggtggcgaccattggcagccgcggcacctatacccattatccggatagcgtgaaaggccgctttaccattagccgcgataacgataaaaacgcgctgtatctgcagatgaacagcctgcgcaccgaagataccgcgatgtattattgcgcgcgcaaaagcgaattttattattatggcaacacctattattatagcgcgatggattattggggccagggcgcgagcgtgaccgtgagcagctaa

SEQ ID NO: 1337 - DNA, 1227 bp, synthetic construct
  source 1..1227: mol_type = other DNA; note = NLS-RNF125-(GS)6-3DX.2 nucleic acid
ccggcggcgaaacgcgtgaaactggatggcagcggcagcggcagcggctccgtgctgagcaccgacagcggcaaatcggcgcccgcctctgccaccgcgcgggccctggagcgcaggagggacccggagttgcccgtcacgtccttcgactgcgccgtgtgccttgaggtgttacaccagcctgtccggacccgctgcggccacgtattctgccgttcctgtattgctaccagtctgaagaacaacaagtggacctgtccttattgccgggcatatcttccttcagaaggagttccagcaactgatgtagccaaaagaatgaaatcagagtataagaactgcgctgagtgtgacaccctggtttgcctcagtgaaatgagggcacatattcggacttgtcagaagtacatagataagtatggaccaggcagcggcagcggcagcggcagcggcagcggcagcgatattgtgctgacccagagcccggcgagcctggcggtgagcctgggccagcgcgcgaccattagctgccgcgcgagcgaaagcgtggataactatggctttagctttatgaactggtttcagcagaaaccgggccagccgccgaaactgctgatttatgcgaccagcaaccgcggcagcggcgtgccggcgcgctttagcggcagcggcagcggcaccgattttagcctgaacattcatccggtggaagaagatgatagcgcgatgtatttttgccagcagaccaaagaagtgccgtggacctttggcggcggcaccaaactggaaattaaacgcggcggcggcggcagcggcggcggcgatagcggcggcggcggcagcgaagtgaaactggtggaaagcggcggcgatctggtgaaaccgggcggcagcctgaaactgagctgcgcggcgagcggctttacctttagccattatggcatgagctgggtgcgccagaccccggataaacgcctggaatgggtggcgaccattggcagccgcggcacctatacccattatccggatagcgtgaaaggccgctttaccattagccgcgataacgataaaaacgcgctgtatctgcagatgaacagcctgcgcaccgaagataccgcgatgtattattgcgcgcgcaaaagcgaattttattattatggcaacacctattattatagcgcgatggattattggggccagggcgcgagcgtgaccgtgagcagctaa

SEQ ID NO: 1338 - DNA, 1227 bp, synthetic construct
  source 1..1227: mol_type = other DNA; note = HA-NLS-RNF125-(GS)1-3DX.2 nucleic acid
atgtacccatacgatgttccagattacgctccggcggcgaaacgcgtgaaactggatggcagcggcagcggcagcggctccgtgctgagcaccgacagcggcaaatcggcgcccgcctctgccaccgcgcgggccctggagcgcaggagggacccggagttgcccgtcacgtccttcgactgcgccgtgtgccttgaggtgttacaccagcctgtccggacccgctgcggccacgtattctgccgttcctgtattgctaccagtctgaagaacaacaagtggacctgtccttattgccgggcatatcttccttcagaaggagttccagcaactgatgtagccaaaagaatgaaatcagagtataagaactgcgctgagtgtgacaccctggtttgcctcagtgaaatgagggcacatattcggacttgtcagaagtacatagataagtatggaccaggcagcgatattgtgctgacccagagcccggcgagcctggcggtgagcctgggccagcgcgcgaccattagctgccgcgcgagcgaaagcgtggataactatggctttagctttatgaactggtttcagcagaaaccgggccagccgccgaaactgctgatttatgcgaccagcaaccgcggcagcggcgtgccggcgcgctttagcggcagcggcagcggcaccgattttagcctgaacattcatccggtggaagaagatgatagcgcgatgtatttttgccagcagaccaaagaagtgccgtggacctttggcggcggcaccaaactggaaattaaacgcggcggcggcggcagcggcggcggcgatagcggcggcggcggcagcgaagtgaaactggtggaaagcggcggcgatctggtgaaaccgggcggcagcctgaaactgagctgcgcggcgagcggctttacctttagccattatggcatgagctgggtgcgccagaccccggataaacgcctggaatgggtggcgaccattggcagccgcggcacctatacccattatccggatagcgtgaaaggccgctttaccattagccgcgataacgataaaaacgcgctgtatctgcagatgaacagcctgcgcaccgaagataccgcgatgtattattgcgcgcgcaaaagcgaattttattattatggcaacacctattattatagcgcgatggattattggggccagggcgcgagcgtgaccgtgagcagctaa

SEQ ID NO: 1339 - DNA, 1233 bp, synthetic construct
  source 1..1233: mol_type = other DNA; note = HA-NLS-RNF125-(GS)2-3DX.2 nucleic acid
atgtacccatacgatgttccagattacgctccggcggcgaaacgcgtgaaactggatggcagcggcagcggcagcggctccgtgctgagcaccgacagcggcaaatcggcgcccgcctctgccaccgcgcgggccctggagcgcaggagggacccggagttgcccgtcacgtccttcgactgcgccgtgtgccttgaggtgttacaccagcctgtccggacccgctgcggccacgtattctgccgttcctgtattgctaccagtctgaagaacaacaagtggacctgtccttattgccgggcatatcttccttcagaaggagttccagcaactgatgtagccaaaagaatgaaatcagagtataagaactgcgctgagtgtgacaccctggtttgcctcagtgaaatgagggcacatattcggacttgtcagaagtacatagataagtatggaccaggcagcggcagcgatattgtgctgacccagagcccggcgagcctggcggtgagcctgggccagcgcgcgaccattagctgccgcgcgagcgaaagcgtggataactatggctttagctttatgaactggtttcagcagaaaccgggccagccgccgaaactgctgatttatgcgaccagcaaccgcggcagcggcgtgccggcgcgctttagcggcagcggcagcggcaccgattttagcctgaacattcatccggtggaagaagatgatagcgcgatgtatttttgccagcagaccaaagaagtgccgtggacctttggcggcggcaccaaactggaaattaaacgcggcggcggcggcagcggcggcggcgatagcggcggcggcggcagcgaagtgaaactggtggaaagcggcggcgatctggtgaaaccgggcggcagcctgaaactgagctgcgcggcgagcggctttacctttagccattatggcatgagctgggtgcgccagaccccggataaacgcctggaatgggtggcgaccattggcagccgcggcacctatacccattatccggatagcgtgaaaggccgctttaccattagccgcgataacgataaaaacgcgctgtatctgcagatgaacagcctgcgcaccgaagataccgcgatgtattattgcgcgcgcaaaagcgaattttattattatggcaacacctattattatagcgcgatggattattggggccagggcgcgagcgtgaccgtgagcagctaa

SEQ ID NO: 1340 - DNA, 1239 bp, synthetic construct
  source 1..1239: mol_type = other DNA; note = HA-NLS-RNF125-(GS)3-3DX.2 nucleic acid
atgtacccatacgatgttccagattacgctccggcggcgaaacgcgtgaaactggatggcagcggcagcggcagcggctccgtgctgagcaccgacagcggcaaatcggcgcccgcctctgccaccgcgcgggccctggagcgcaggagggacccggagttgcccgtcacgtccttcgactgcgccgtgtgccttgaggtgttacaccagcctgtccggacccgctgcggccacgtattctgccgttcctgtattgctaccagtctgaagaacaacaagtggacctgtccttattgccgggcatatcttccttcagaaggagttccagcaactgatgtagccaaaagaatgaaatcagagtataagaactgcgctgagtgtgacaccctggtttgcctcagtgaaatgagggcacatattcggacttgtcagaagtacatagataagtatggaccaggcagcggcagcggcagcgatattgtgctgacccagagcccggcgagcctggcggtgagcctgggccagcgcgcgaccattagctgccgcgcgagcgaaagcgtggataactatggctttagctttatgaactggtttcagcagaaaccgggccagccgccgaaactgctgatttatgcgaccagcaaccgcggcagcggcgtgccggcgcgctttagcggcagcggcagcggcaccgattttagcctgaacattcatccggtggaagaagatgatagcgcgatgtatttttgccagcagaccaaagaagtgccgtggacctttggcggcggcaccaaactggaaattaaacgcggcggcggcggcagcggcggcggcgatagcggcggcggcggcagcgaagtgaaactggtggaaagcggcggcgatctggtgaaaccgggcggcagcctgaaactgagctgcgcggcgagcggctttacctttagccattatggcatgagctgggtgcgccagaccccggataaacgcctggaatgggtggcgaccattggcagccgcggcacctatacccattatccggatagcgtgaaaggccgctttaccattagccgcgataacgataaaaacgcgctgtatctgcagatgaacagcctgcgcaccgaagataccgcgatgtattattgcgcgcgcaaaagcgaattttattattatggcaacacctattattatagcgcgatggattattggggccagggcgcgagcgtgaccgtgagcagctaa

SEQ ID NO: 1341 - DNA, 1245 bp, synthetic construct
  source 1..1245: mol_type = other DNA; note = HA-NLS-RNF125-(GS)4-3DX.2 nucleic acid
atgtacccatacgatgttccagattacgctccggcggcgaaacgcgtgaaactggatggcagcggcagcggcagcggctccgtgctgagcaccgacagcggcaaatcggcgcccgcctctgccaccgcgcgggccctggagcgcaggagggacccggagttgcccgtcacgtccttcgactgcgccgtgtgccttgaggtgttacaccagcctgtccggacccgctgcggccacgtattctgccgttcctgtattgctaccagtctgaagaacaacaagtggacctgtccttattgccgggcatatcttccttcagaaggagttccagcaactgatgtagccaaaagaatgaaatcagagtataagaactgcgctgagtgtgacaccctggtttgcctcagtgaaatgagggcacatattcggacttgtcagaagtacatagataagtatggaccaggcagcggcagcggcagcggcagcgatattgtgctgacccagagcccggcgagcctggcggtgagcctgggccagcgcgcgaccattagctgccgcgcgagcgaaagcgtggataactatggctttagctttatgaactggtttcagcagaaaccgggccagccgccgaaactgctgatttatgcgaccagcaaccgcggcagcggcgtgccggcgcgctttagcggcagcggcagcggcaccgattttagcctgaacattcatccggtggaagaagatgatagcgcgatgtatttttgccagcagaccaaagaagtgccgtggacctttggcggcggcaccaaactggaaattaaacgcggcggcggcggcagcggcggcggcgatagcggcggcggcggcagcgaagtgaaactggtggaaagcggcggcgatctggtgaaaccgggcggcagcctgaaactgagctgcgcggcgagcggctttacctttagccattatggcatgagctgggtgcgccagaccccggataaacgcctggaatgggtggcgaccattggcagccgcggcacctatacccattatccggatagcgtgaaaggccgctttaccattagccgcgataacgataaaaacgcgctgtatctgcagatgaacagcctgcgcaccgaagataccgcgatgtattattgcgcgcgcaaaagcgaattttattattatggcaacacctattattatagcgcgatggattattggggccagggcgcgagcgtgaccgtgagcagctaa

SEQ ID NO: 1342 - DNA, 1251 bp, synthetic construct
  source 1..1251: mol_type = other DNA; note = HA-NLS-RNF125-(GS)5-3DX.2 nucleic acid
atgtacccatacgatgttccagattacgctccggcggcgaaacgcgtgaaactggatggcagcggcagcggcagcggctccgtgctgagcaccgacagcggcaaatcggcgcccgcctctgccaccgcgcgggccctggagcgcaggagggacccggagttgcccgtcacgtccttcgactgcgccgtgtgccttgaggtgttacaccagcctgtccggacccgctgcggccacgtattctgccgttcctgtattgctaccagtctgaagaacaacaagtggacctgtccttattgccgggcatatcttccttcagaaggagttccagcaactgatgtagccaaaagaatgaaatcagagtataagaactgcgctgagtgtgacaccctggtttgcctcagtgaaatgagggcacatattcggacttgtcagaagtacatagataagtatggaccaggcagcggcagcggcagcggcagcggcagcgatattgtgctgacccagagcccggcgagcctggcggtgagcctgggccagcgcgcgaccattagctgccgcgcgagcgaaagcgtggataactatggctttagctttatgaactggtttcagcagaaaccgggccagccgccgaaactgctgatttatgcgaccagcaaccgcggcagcggcgtgccggcgcgctttagcggcagcggcagcggcaccgattttagcctgaacattcatccggtggaagaagatgatagcgcgatgtatttttgccagcagaccaaagaagtgccgtggacctttggcggcggcaccaaactggaaattaaacgcggcggcggcggcagcggcggcggcgatagcggcggcggcggcagcgaagtgaaactggtggaaagcggcggcgatctggtgaaaccgggcggcagcctgaaactgagctgcgcggcgagcggctttacctttagccattatggcatgagctgggtgcgccagaccccggataaacgcctggaatgggtggcgaccattggcagccgcggcacctatacccattatccggatagcgtgaaaggccgctttaccattagccgcgataacgataaaaacgcgctgtatctgcagatgaacagcctgcgcaccgaagataccgcgatgtattattgcgcgcgcaaaagcgaattttattattatggcaacacctattattatagcgcgatggattattggggccagggcgcgagcgtgaccgtgagcagctaa

SEQ ID NO: 1343 - DNA, 1257 bp, synthetic construct
  source 1..1257: mol_type = other DNA; note = HA-NLS-RNF125-(GS)6-3DX.2 nucleic acid
atgtacccatacgatgttccagattacgctccggcggcgaaacgcgtgaaactggatggcagcggcagcggcagcggctccgtgctgagcaccgacagcggcaaatcggcgcccgcctctgccaccgcgcgggccctggagcgcaggagggacccggagttgcccgtcacgtccttcgactgcgccgtgtgccttgaggtgttacaccagcctgtccggacccgctgcggccacgtattctgccgttcctgtattgctaccagtctgaagaacaacaagtggacctgtccttattgccgggcatatcttccttcagaaggagttccagcaactgatgtagccaaaagaatgaaatcagagtataagaactgcgctgagtgtgacaccctggtttgcctcagtgaaatgagggcacatattcggacttgtcagaagtacatagataagtatggaccaggcagcggcagcggcagcggcagcggcagcggcagcgatattgtgctgacccagagcccggcgagcctggcggtgagcctgggccagcgcgcgaccattagctgccgcgcgagcgaaagcgtggataactatggctttagctttatgaactggtttcagcagaaaccgggccagccgccgaaactgctgatttatgcgaccagcaaccgcggcagcggcgtgccggcgcgctttagcggcagcggcagcggcaccgattttagcctgaacattcatccggtggaagaagatgatagcgcgatgtatttttgccagcagaccaaagaagtgccgtggacctttggcggcggcaccaaactggaaattaaacgcggcggcggcggcagcggcggcggcgatagcggcggcggcggcagcgaagtgaaactggtggaaagcggcggcgatctggtgaaaccgggcggcagcctgaaactgagctgcgcggcgagcggctttacctttagccattatggcatgagctgggtgcgccagaccccggataaacgcctggaatgggtggcgaccattggcagccgcggcacctatacccattatccggatagcgtgaaaggccgctttaccattagccgcgataacgataaaaacgcgctgtatctgcagatgaacagcctgcgcaccgaagataccgcgatgtattattgcgcgcgcaaaagcgaattttattattatggcaacacctattattatagcgcgatggattattggggccagggcgcgagcgtgaccgtgagcagctaa

SEQ ID NO: 1344 - DNA, 1494 bp, synthetic construct
  source 1..1494: mol_type = other DNA; note = 3DX.2-(GS)1-SPOP-NLS nucleic acid
atggatattgtgctgacccagagcccggcgagcctggcggtgagcctgggccagcgcgcgaccattagctgccgcgcgagcgaaagcgtggataactatggctttagctttatgaactggtttcagcagaaaccgggccagccgccgaaactgctgatttatgcgaccagcaaccgcggcagcggcgtgccggcgcgctttagcggcagcggcagcggcaccgattttagcctgaacattcatccggtggaagaagatgatagcgcgatgtatttttgccagcagaccaaagaagtgccgtggacctttggcggcggcaccaaactggaaattaaacgcggcggcggcggcagcggcggcggcgatagcggcggcggcggcagcgaagtgaaactggtggaaagcggcggcgatctggtgaaaccgggcggcagcctgaaactgagctgcgcggcgagcggctttacctttagccattatggcatgagctgggtgcgccagaccccggataaacgcctggaatgggtggcgaccattggcagccgcggcacctatacccattatccggatagcgtgaaaggccgctttaccattagccgcgataacgataaaaacgcgctgtatctgcagatgaacagcctgcgcaccgaagataccgcgatgtattattgcgcgcgcaaaagcgaattttattattatggcaacacctattattatagcgcgatggattattggggccagggcgcgagcgtgaccgtgagcagcggcagcaacgggcttctccctgatgacaagcttaccctcttctgcgaggtgagtgttgtgcaagattctgtcaacatttctggccagaataccatgaacatggtaaaggttcctgagtgccggctggcagatgagttaggaggactgtgggagaattcccggttcacagactgctgcttgtgtgttgccggccaggaattccaggctcacaaggctatcttagcagctcgttctccggtttttagtgccatgtttgaacatgaaatggaggagagcaaaaagaatcgagttgaaatcaatgatgtggagcctgaagtttttaaggaaatgatgtgcttcatttacacggggaaggctccaaacctcgacaaaatggctgatgatttgctggcagctgctgacaagtatgccctggagcgcttaaaggtcatgtgtgaggatgccctctgcagtaacctgtccgtggagaacgctgcagaaattctcatcctggccgacctccacagtgcagatcagttgaaaactcaggcagtggatttcatcaactatcatgcttcggatgtcttggagacctctgggtggaagtcaatggtggtgtcacatccccacttggtggctgaggcataccgctctctggcttcagcacagtgcccttttctgggacccccacgcaaacgcctgaagcaatccggcagcggcagcccggcggcgaaacgcgtgaaactggat

SEQ ID NO: 1345 - DNA, 1500 bp, synthetic construct
  source 1..1500: mol_type = other DNA; note = 3DX.2-(GS)2-SPOP-NLS nucleic acid
atggatattgtgctgacccagagcccggcgagcctggcggtgagcctgggccagcgcgcgaccattagctgccgcgcgagcgaaagcgtggataactatggctttagctttatgaactggtttcagcagaaaccgggccagccgccgaaactgctgatttatgcgaccagcaaccgcggcagcggcgtgccggcgcgctttagcggcagcggcagcggcaccgattttagcctgaacattcatccggtggaagaagatgatagcgcgatgtatttttgccagcagaccaaagaagtgccgtggacctttggcggcggcaccaaactggaaattaaacgcggcggcggcggcagcggcggcggcgatagcggcggcggcggcagcgaagtgaaactggtggaaagcggcggcgatctggtgaaaccgggcggcagcctgaaactgagctgcgcggcgagcggctttacctttagccattatggcatgagctgggtgcgccagaccccggataaacgcctggaatgggtggcgaccattggcagccgcggcacctatacccattatccggatagcgtgaaaggccgctttaccattagccgcgataacgataaaaacgcgctgtatctgcagatgaacagcctgcgcaccgaagataccgcgatgtattattgcgcgcgcaaaagcgaattttattattatggcaacacctattattatagcgcgatggattattggggccagggcgcgagcgtgaccgtgagcagcggcagcggcagcaacgggcttctccctgatgacaagcttaccctcttctgcgaggtgagtgttgtgcaagattctgtcaacatttctggccagaataccatgaacatggtaaaggttcctgagtgccggctggcagatgagttaggaggactgtgggagaattcccggttcacagactgctgcttgtgtgttgccggccaggaattccaggctcacaaggctatcttagcagctcgttctccggtttttagtgccatgtttgaacatgaaatggaggagagcaaaaagaatcgagttgaaatcaatgatgtggagcctgaagtttttaaggaaatgatgtgcttcatttacacggggaaggctccaaacctcgacaaaatggctgatgatttgctggcagctgctgacaagtatgccctggagcgcttaaaggtcatgtgtgaggatgccctctgcagtaacctgtccgtggagaacgctgcagaaattctcatcctggccgacctccacagtgcagatcagttgaaaactcaggcagtggatttcatcaactatcatgcttcggatgtcttggagacctctgggtggaagtcaatggtggtgtcacatccccacttggtggctgaggcataccgctctctggcttcagcacagtgcccttttctgggacccccacgcaaacgcctgaagcaatccggcagcggcagcccggcggcgaaacgcgtgaaactggat

SEQ ID NO: 1346 - DNA, 1506 bp, synthetic construct
  source 1..1506: mol_type = other DNA; note = 3DX.2-(GS)3-SPOP-NLS nucleic acid
atggatattgtgctgacccagagcccggcgagcctggcggtgagcctgggccagcgcgcgaccattagctgccgcgcgagcgaaagcgtggataactatggctttagctttatgaactggtttcagcagaaaccgggccagccgccgaaactgctgatttatgcgaccagcaaccgcggcagcggcgtgccggcgcgctttagcggcagcggcagcggcaccgattttagcctgaacattcatccggtggaagaagatgatagcgcgatgtatttttgccagcagaccaaagaagtgccgtggacctttggcggcggcaccaaactggaaattaaacgcggcggcggcggcagcggcggcggcgatagcggcggcggcggcagcgaagtgaaactggtggaaagcggcggcgatctggtgaaaccgggcggcagcctgaaactgagctgcgcggcgagcggctttacctttagccattatggcatgagctgggtgcgccagaccccggataaacgcctggaatgggtggcgaccattggcagccgcggcacctatacccattatccggatagcgtgaaaggccgctttaccattagccgcgataacgataaaaacgcgctgtatctgcagatgaacagcctgcgcaccgaagataccgcgatgtattattgcgcgcgcaaaagcgaattttattattatggcaacacctattattatagcgcgatggattattggggccagggcgcgagcgtgaccgtgagcagcggcagcggcagcggcagcaacgggcttctccctgatgacaagcttaccctcttctgcgaggtgagtgttgtgcaagattctgtcaacatttctggccagaataccatgaacatggtaaaggttcctgagtgccggctggcagatgagttaggaggactgtgggagaattcccggttcacagactgctgcttgtgtgttgccggccaggaattccaggctcacaaggctatcttagcagctcgttctccggtttttagtgccatgtttgaacatgaaatggaggagagcaaaaagaatcgagttgaaatcaatgatgtggagcctgaagtttttaaggaaatgatgtgcttcatttacacggggaaggctccaaacctcgacaaaatggctgatgatttgctggcagctgctgacaagtatgccctggagcgcttaaaggtcatgtgtgaggatgccctctgcagtaacctgtccgtggagaacgctgcagaaattctcatcctggccgacctccacagtgcagatcagttgaaaactcaggcagtggatttcatcaactatcatgcttcggatgtcttggagacctctgggtggaagtcaatggtggtgtcacatccccacttggtggctgaggcataccgctctctggcttcagcacagtgcccttttctgggacccccacgcaaacgcctgaagcaatccggcagcggcagcccggcggcgaaacgcgtgaaactggat

SEQ ID NO: 1347 - DNA, 1512 bp, synthetic construct
  source 1..1512: mol_type = other DNA; note = 3DX.2-(GS)4-SPOP-NLS nucleic acid
atggatattgtgctgacccagagcccggcgagcctggcggtgagcctgggccagcgcgcgaccattagctgccgcgcgagcgaaagcgtggataactatggctttagctttatgaactggtttcagcagaaaccgggccagccgccgaaactgctgatttatgcgaccagcaaccgcggcagcggcgtgccggcgcgctttagcggcagcggcagcggcaccgattttagcctgaacattcatccggtggaagaagatgatagcgcgatgtatttttgccagcagaccaaagaagtgccgtggacctttggcggcggcaccaaactggaaattaaacgcggcggcggcggcagcggcggcggcgatagcggcggcggcggcagcgaagtgaaactggtggaaagcggcggcgatctggtgaaaccgggcggcagcctgaaactgagctgcgcggcgagcggctttacctttagccattatggcatgagctgggtgcgccagaccccggataaacgcctggaatgggtggcgaccattggcagccgcggcacctatacccattatccggatagcgtgaaaggccgctttaccattagccgcgataacgataaaaacgcgctgtatctgcagatgaacagcctgcgcaccgaagataccgcgatgtattattgcgcgcgcaaaagcgaattttattattatggcaacacctattattatagcgcgatggattattggggccagggcgcgagcgtgaccgtgagcagcggcagcggcagcggcagcggcagcaacgggcttctccctgatgacaagcttaccctcttctgcgaggtgagtgttgtgcaagattctgtcaacatttctggccagaataccatgaacatggtaaaggttcctgagtgccggctggcagatgagttaggaggactgtgggagaattcccggttcacagactgctgcttgtgtgttgccggccaggaattccaggctcacaaggctatcttagcagctcgttctccggtttttagtgccatgtttgaacatgaaatggaggagagcaaaaagaatcgagttgaaatcaatgatgtggagcctgaagtttttaaggaaatgatgtgcttcatttacacggggaaggctccaaacctcgacaaaatggctgatgatttgctggcagctgctgacaagtatgccctggagcgcttaaaggtcatgtgtgaggatgccctctgcagtaacctgtccgtggagaacgctgcagaaattctcatcctggccgacctccacagtgcagatcagttgaaaactcaggcagtggatttcatcaactatcatgcttcggatgtcttggagacctctgggtggaagtcaatggtggtgtcacatccccacttggtggctgaggcataccgctctctggcttcagcacagtgcccttttctgggacccccacgcaaacgcctgaagcaatccggcagcggcagcccggcggcgaaacgcgtgaaactggat

SEQ ID NO: 1348 - DNA, 1518 bp, synthetic construct
  source 1..1518: mol_type = other DNA; note = 3DX.2-(GS)5-SPOP-NLS nucleic acid
atggatattgtgctgacccagagcccggcgagcctggcggtgagcctgggccagcgcgcgaccattagctgccgcgcgagcgaaagcgtggataactatggctttagctttatgaactggtttcagcagaaaccgggccagccgccgaaactgctgatttatgcgaccagcaaccgcggcagcggcgtgccggcgcgctttagcggcagcggcagcggcaccgattttagcctgaacattcatccggtggaagaagatgatagcgcgatgtatttttgccagcagaccaaagaagtgccgtggacctttggcggcggcaccaaactggaaattaaacgcggcggcggcggcagcggcggcggcgatagcggcggcggcggcagcgaagtgaaactggtggaaagcggcggcgatctggtgaaaccgggcggcagcctgaaactgagctgcgcggcgagcggctttacctttagccattatggcatgagctgggtgcgccagaccccggataaacgcctggaatgggtggcgaccattggcagccgcggcacctatacccattatccggatagcgtgaaaggccgctttaccattagccgcgataacgataaaaacgcgctgtatctgcagatgaacagcctgcgcaccgaagataccgcgatgtattattgcgcgcgcaaaagcgaattttattattatggcaacacctattattatagcgcgatggattattggggccagggcgcgagcgtgaccgtgagcagcggcagcggcagcggcagcggcagcggcagcaacgggcttctccctgatgacaagcttaccctcttctgcgaggtgagtgttgtgcaagattctgtcaacatttctggccagaataccatgaacatggtaaaggttcctgagtgccggctggcagatgagttaggaggactgtgggagaattcccggttcacagactgctgcttgtgtgttgccggccaggaattccaggctcacaaggctatcttagcagctcgttctccggtttttagtgccatgtttgaacatgaaatggaggagagcaaaaagaatcgagttgaaatcaatgatgtggagcctgaagtttttaaggaaatgatgtgcttcatttacacggggaaggctccaaacctcgacaaaatggctgatgatttgctggcagctgctgacaagtatgccctggagcgcttaaaggtcatgtgtgaggatgccctctgcagtaacctgtccgtggagaacgctgcagaaattctcatcctggccgacctccacagtgcagatcagttgaaaactcaggcagtggatttcatcaactatcatgcttcggatgtcttggagacctctgggtggaagtcaatggtggtgtcacatccccacttggtggctgaggcataccgctctctggcttcagcacagtgcccttttctgggacccccacgcaaacgcctgaagcaatccggcagcggcagcccggcggcgaaacgcgtgaaactggat

SEQ ID NO: 1349 - DNA, 1524 bp, synthetic construct
  source 1..1524: mol_type = other DNA; note = 3DX.2-(GS)6-SPOP-NLS nucleic acid
atggatattgtgctgacccagagcccggcgagcctggcggtgagcctgggccagcgcgcgaccattagctgccgcgcgagcgaaagcgtggataactatggctttagctttatgaactggtttcagcagaaaccgggccagccgccgaaactgctgatttatgcgaccagcaaccgcggcagcggcgtgccggcgcgctttagcggcagcggcagcggcaccgattttagcctgaacattcatccggtggaagaagatgatagcgcgatgtatttttgccagcagaccaaagaagtgccgtggacctttggcggcggcaccaaactggaaattaaacgcggcggcggcggcagcggcggcggcgatagcggcggcggcggcagcgaagtgaaactggtggaaagcggcggcgatctggtgaaaccgggcggcagcctgaaactgagctgcgcggcgagcggctttacctttagccattatggcatgagctgggtgcgccagaccccggataaacgcctggaatgggtggcgaccattggcagccgcggcacctatacccattatccggatagcgtgaaaggccgctttaccattagccgcgataacgataaaaacgcgctgtatctgcagatgaacagcctgcgcaccgaagataccgcgatgtattattgcgcgcgcaaaagcgaattttattattatggcaacacctattattatagcgcgatggattattggggccagggcgcgagcgtgaccgtgagcagcggcagcggcagcggcagcggcagcggcagcggcagcaacgggcttctccctgatgacaagcttaccctcttctgcgaggtgagtgttgtgcaagattctgtcaacatttctggccagaataccatgaacatggtaaaggttcctgagtgccggctggcagatgagttaggaggactgtgggagaattcccggttcacagactgctgcttgtgtgttgccggccaggaattccaggctcacaaggctatcttagcagctcgttctccggtttttagtgccatgtttgaacatgaaatggaggagagcaaaaagaatcgagttgaaatcaatgatgtggagcctgaagtttttaaggaaatgatgtgcttcatttacacggggaaggctccaaacctcgacaaaatggctgatgatttgctggcagctgctgacaagtatgccctggagcgcttaaaggtcatgtgtgaggatgccctctgcagtaacctgtccgtggagaacgctgcagaaattctcatcctggccgacctccacagtgcagatcagttgaaaactcaggcagtggatttcatcaactatcatgcttcggatgtcttggagacctctgggtggaagtcaatggtggtgtcacatccccacttggtggctgaggcataccgctctctggcttcagcacagtgcccttttctgggacccccacgcaaacgcctgaagcaatccggcagcggcagcccggcggcgaaacgcgtgaaactggat

SEQ ID NO: 1350 - DNA, 1524 bp, synthetic construct
  source 1..1524: mol_type = other DNA; note = 3DX.2-(GS)1-SPOP-NLS-HA nucleic acid
atggatattgtgctgacccagagcccggcgagcctggcggtgagcctgggccagcgcgcgaccattagctgccgcgcgagcgaaagcgtggataactatggctttagctttatgaactggtttcagcagaaaccgggccagccgccgaaactgctgatttatgcgaccagcaaccgcggcagcggcgtgccggcgcgctttagcggcagcggcagcggcaccgattttagcctgaacattcatccggtggaagaagatgatagcgcgatgtatttttgccagcagaccaaagaagtgccgtggacctttggcggcggcaccaaactggaaattaaacgcggcggcggcggcagcggcggcggcgatagcggcggcggcggcagcgaagtgaaactggtggaaagcggcggcgatctggtgaaaccgggcggcagcctgaaactgagctgcgcggcgagcggctttacctttagccattatggcatgagctgggtgcgccagaccccggataaacgcctggaatgggtggcgaccattggcagccgcggcacctatacccattatccggatagcgtgaaaggccgctttaccattagccgcgataacgataaaaacgcgctgtatctgcagatgaacagcctgcgcaccgaagataccgcgatgtattattgcgcgcgcaaaagcgaattttattattatggcaacacctattattatagcgcgatggattattggggccagggcgcgagcgtgaccgtgagcagcggcagcaacgggcttctccctgatgacaagcttaccctcttctgcgaggtgagtgttgtgcaagattctgtcaacatttctggccagaataccatgaacatggtaaaggttcctgagtgccggctggcagatgagttaggaggactgtgggagaattcccggttcacagactgctgcttgtgtgttgccggccaggaattccaggctcacaaggctatcttagcagctcgttctccggtttttagtgccatgtttgaacatgaaatggaggagagcaaaaagaatcgagttgaaatcaatgatgtggagcctgaagtttttaaggaaatgatgtgcttcatttacacggggaaggctccaaacctcgacaaaatggctgatgatttgctggcagctgctgacaagtatgccctggagcgcttaaaggtcatgtgtgaggatgccctctgcagtaacctgtccgtggagaacgctgcagaaattctcatcctggccgacctccacagtgcagatcagttgaaaactcaggcagtggatttcatcaactatcatgcttcggatgtcttggagacctctgggtggaagtcaatggtggtgtcacatccccacttggtggctgaggcataccgctctctggcttcagcacagtgcccttttctgggacccccacgcaaacgcctgaagcaatccggcagcggcagcccggcggcgaaacgcgtgaaactggattacccatacgatgttccagattacgcttaa

SEQ ID NO: 1351 - DNA, 1530 bp, synthetic construct
  source 1..1530: mol_type = other DNA; note = 3DX.2-(GS)2-SPOP-NLS-HA nucleic acid
atggatattgtgctgacccagagcccggcgagcctggcggtgagcctgggccagcgcgcgaccattagctgccgcgcgagcgaaagcgtggataactatggctttagctttatgaactggtttcagcagaaaccgggccagccgccgaaactgctgatttatgcgaccagcaaccgcggcagcggcgtgccggcgcgctttagcggcagcggcagcggcaccgattttagcctgaacattcatccggtggaagaagatgatagcgcgatgtatttttgccagcagaccaaagaagtgccgtggacctttggcggcggcaccaaactggaaattaaacgcggcggcggcggcagcggcggcggcgatagcggcggcggcggcagcgaagtgaaactggtggaaagcggcggcgatctggtgaaaccgggcggcagcctgaaactgagctgcgcggcgagcggctttacctttagccattatggcatgagctgggtgcgccagaccccggataaacgcctggaatgggtggcgaccattggcagccgcggcacctatacccattatccggatagcgtgaaaggccgctttaccattagccgcgataacgataaaaacgcgctgtatctgcagatgaacagcctgcgcaccgaagataccgcgatgtattattgcgcgcgcaaaagcgaattttattattatggcaacacctattattatagcgcgatggattattggggccagggcgcgagcgtgaccgtgagcagcggcagcggcagcaacgggcttctccctgatgacaagcttaccctcttctgcgaggtgagtgttgtgcaagattctgtcaacatttctggccagaataccatgaacatggtaaaggttcctgagtgccggctggcagatgagttaggaggactgtgggagaattcccggttcacagactgctgcttgtgtgttgccggccaggaattccaggctcacaaggctatcttagcagctcgttctccggtttttagtgccatgtttgaacatgaaatggaggagagcaaaaagaatcgagttgaaatcaatgatgtggagcctgaagtttttaaggaaatgatgtgcttcatttacacggggaaggctccaaacctcgacaaaatggctgatgatttgctggcagctgctgacaagtatgccctggagcgcttaaaggtcatgtgtgaggatgccctctgcagtaacctgtccgtggagaacgctgcagaaattctcatcctggccgacctccacagtgcagatcagttgaaaactcaggcagtggatttcatcaactatcatgcttcggatgtcttggagacctctgggtggaagtcaatggtggtgtcacatccccacttggtggctgaggcataccgctctctggcttcagcacagtgcccttttctgggacccccacgcaaacgcctgaagcaatccggcagcggcagcccggcggcgaaacgcgtgaaactggattacccatacgatgttccagattacgcttaa

SEQ ID NO: 1352 - DNA, 1536 bp, synthetic construct
  source 1..1536: mol_type = other DNA; note = 3DX.2-(GS)3-SPOP-NLS-HA nucleic acid
atggatattgtgctgacccagagcccggcgagcctggcggtgagcctgggccagcgcgcgaccattagctgccgcgcgagcgaaagcgtggataactatggctttagctttatgaactggtttcagcagaaaccgggccagccgccgaaactgctgatttatgcgaccagcaaccgcggcagcggcgtgccggcgcgctttagcggcagcggcagcggcaccgattttagcctgaacattcatccggtggaagaagatgatagcgcgatgtatttttgccagcagaccaaagaagtgccgtggacctttggcggcggcaccaaactggaaattaaacgcggcggcggcggcagcggcggcggcgatagcggcggcggcggcagcgaagtgaaactggtggaaagcggcggcgatctggtgaaaccgggcggcagcctgaaactgagctgcgcggcgagcggctttacctttagccattatggcatgagctgggtgcgccagaccccggataaacgcctggaatgggtggcgaccattggcagccgcggcacctatacccattatccggatagcgtgaaaggccgctttaccattagccgcgataacgataaaaacgcgctgtatctgcagatgaacagcctgcgcaccgaagataccgcgatgtattattgcgcgcgcaaaagcgaattttattattatggcaacacctattattatagcgcgatggattattggggccagggcgcgagcgtgaccgtgagcagcggcagcggcagcggcagcaacgggcttctccctgatgacaagcttaccctcttctgcgaggtgagtgttgtgcaagattctgtcaacatttctggccagaataccatgaacatggtaaaggttcctgagtgccggctggcagatgagttaggaggactgtgggagaattcccggttcacagactgctgcttgtgtgttgccggccaggaattccaggctcacaaggctatcttagcagctcgttctccggtttttagtgccatgtttgaacatgaaatggaggagagcaaaaagaatcgagttgaaatcaatgatgtggagcctgaagtttttaaggaaatgatgtgcttcatttacacggggaaggctccaaacctcgacaaaatggctgatgatttgctggcagctgctgacaagtatgccctggagcgcttaaaggtcatgtgtgaggatgccctctgcagtaacctgtccgtggagaacgctgcagaaattctcatcctggccgacctccacagtgcagatcagttgaaaactcaggcagtggatttcatcaactatcatgcttcggatgtcttggagacctctgggtggaagtcaatggtggtgtcacatccccacttggtggctgaggcataccgctctctggcttcagcacagtgcccttttctgggacccccacgcaaacgcctgaagcaatccggcagcggcagcccggcggcgaaacgcgtgaaactggattacccatacgatgttccagattacgcttaa

SEQ ID NO: 1353 - DNA, 1542 bp, synthetic construct
  source 1..1542: mol_type = other DNA; note = 3DX.2-(GS)4-SPOP-NLS-HA nucleic acid
atggatattgtgctgacccagagcccggcgagcctggcggtgagcctgggccagcgcgcgaccattagctgccgcgcgagcgaaagcgtggataactatggctttagctttatgaactggtttcagcagaaaccgggccagccgccgaaactgctgatttatgcgaccagcaaccgcggcagcggcgtgccggcgcgctttagcggcagcggcagcggcaccgattttagcctgaacattcatccggtggaagaagatgatagcgcgatgtatttttgccagcagaccaaagaagtgccgtggacctttggcggcggcaccaaactggaaattaaacgcggcggcggcggcagcggcggcggcgatagcggcggcggcggcagcgaagtgaaactggtggaaagcggcggcgatctggtgaaaccgggcggcagcctgaaactgagctgcgcggcgagcggctttacctttagccattatggcatgagctgggtgcgccagaccccggataaacgcctggaatgggtggcgaccattggcagccgcggcacctatacccattatccggatagcgtgaaaggccgctttaccattagccgcgataacgataaaaacgcgctgtatctgcagatgaacagcctgcgcaccgaagataccgcgatgtattattgcgcgcgcaaaagcgaattttattattatggcaacacctattattatagcgcgatggattattggggccagggcgcgagcgtgaccgtgagcagcggcagcggcagcggcagcggcagcaacgggcttctccctgatgacaagcttaccctcttctgcgaggtgagtgttgtgcaagattctgtcaacatttctggccagaataccatgaacatggtaaaggttcctgagtgccggctggcagatgagttaggaggactgtgggagaattcccggttcacagactgctgcttgtgtgttgccggccaggaattccaggctcacaaggctatcttagcagctcgttctccggtttttagtgccatgtttgaacatgaaatggaggagagcaaaaagaatcgagttgaaatcaatgatgtggagcctgaagtttttaaggaaatgatgtgcttcatttacacggggaaggctccaaacctcgacaaaatggctgatgatttgctggcagctgctgacaagtatgccctggagcgcttaaaggtcatgtgtgaggatgccctctgcagtaacctgtccgtggagaacgctgcagaaattctcatcctggccgacctccacagtgcagatcagttgaaaactcaggcagtggatttcatcaactatcatgcttcggatgtcttggagacctctgggtggaagtcaatggtggtgtcacatccccacttggtggctgaggcataccgctctctggcttcagcacagtgcccttttctgggacccccacgcaaacgcctgaagcaatccggcagcggcagcccggcggcgaaacgcgtgaaactggattacccatacgatgttccagattacgcttaa

SEQ ID NO: 1354 - DNA, 1548 bp, synthetic construct
  source 1..1548: mol_type = other DNA; note = 3DX.2-(GS)5-SPOP-NLS-HA nucleic acid
atggatattgtgctgacccagagcccggcgagcctggcggtgagcctgggccagcgcgcgaccattagctgccgcgcgagcgaaagcgtggataactatggctttagctttatgaactggtttcagcagaaaccgggccagccgccgaaactgctgatttatgcgaccagcaaccgcggcagcggcgtgccggcgcgctttagcggcagcggcagcggcaccgattttagcctgaacattcatccggtggaagaagatgatagcgcgatgtatttttgccagcagaccaaagaagtgccgtggacctttggcggcggcaccaaactggaaattaaacgcggcggcggcggcagcggcggcggcgatagcggcggcggcggcagcgaagtgaaactggtggaaagcggcggcgatctggtgaaaccgggcggcagcctgaaactgagctgcgcggcgagcggctttacctttagccattatggcatgagctgggtgcgccagaccccggataaacgcctggaatgggtggcgaccattggcagccgcggcacctatacccattatccggatagcgtgaaaggccgctttaccattagccgcgataacgataaaaacgcgctgtatctgcagatgaacagcctgcgcaccgaagataccgcgatgtattattgcgcgcgcaaaagcgaattttattattatggcaacacctattattatagcgcgatggattattggggccagggcgcgagcgtgaccgtgagcagcggcagcggcagcggcagcggcagcggcagcaacgggcttctccctgatgacaagcttaccctcttctgcgaggtgagtgttgtgcaagattctgtcaacatttctggccagaataccatgaacatggtaaaggttcctgagtgccggctggcagatgagttaggaggactgtgggagaattcccggttcacagactgctgcttgtgtgttgccggccaggaattccaggctcacaaggctatcttagcagctcgttctccggtttttagtgccatgtttgaacatgaaatggaggagagcaaaaagaatcgagttgaaatcaatgatgtggagcctgaagtttttaaggaaatgatgtgcttcatttacacggggaaggctccaaacctcgacaaaatggctgatgatttgctggcagctgctgacaagtatgccctggagcgcttaaaggtcatgtgtgaggatgccctctgcagtaacctgtccgtggagaacgctgcagaaattctcatcctggccgacctccacagtgcagatcagttgaaaactcaggcagtggatttcatcaactatcatgcttcggatgtcttggagacctctgggtggaagtcaatggtggtgtcacatccccacttggtggctgaggcataccgctctctggcttcagcacagtgcccttttctgggacccccacgcaaacgcctgaagcaatccggcagcggcagcccggcggcgaaacgcgtgaaactggattacccatacgatgttccagattacgcttaa

SEQ ID NO: 1355 - DNA, 1554 bp, synthetic construct
  source 1..1554: mol_type = other DNA; note = 3DX.2-(GS)6-SPOP-NLS-HA nucleic acid
atggatattgtgctgacccagagcccggcgagcctggcggtgagcctgggccagcgcgcgaccattagctgccgcgcgagcgaaagcgtggataactatggctttagctttatgaactggtttcagcagaaaccgggccagccgccgaaactgctgatttatgcgaccagcaaccgcggcagcggcgtgccggcgcgctttagcggcagcggcagcggcaccgattttagcctgaacattcatccggtggaagaagatgatagcgcgatgtatttttgccagcagaccaaagaagtgccgtggacctttggcggcggcaccaaactggaaattaaacgcggcggcggcggcagcggcggcggcgatagcggcggcggcggcagcgaagtgaaactggtggaaagcggcggcgatctggtgaaaccgggcggcagcctgaaactgagctgcgcggcgagcggctttacctttagccattatggcatgagctgggtgcgccagaccccggataaacgcctggaatgggtggcgaccattggcagccgcggcacctatacccattatccggatagcgtgaaaggccgctttaccattagccgcgataacgataaaaacgcgctgtatctgcagatgaacagcctgcgcaccgaagataccgcgatgtattattgcgcgcgcaaaagcgaattttattattatggcaacacctattattatagcgcgatggattattggggccagggcgcgagcgtgaccgtgagcagcggcagcggcagcggcagcggcagcggcagcggcagcaacgggcttctccctgatgacaagcttaccctcttctgcgaggtgagtgttgtgcaagattctgtcaacatttctggccagaataccatgaacatggtaaaggttcctgagtgccggctggcagatgagttaggaggactgtgggagaattcccggttcacagactgctgcttgtgtgttgccggccaggaattccaggctcacaaggctatcttagcagctcgttctccggtttttagtgccatgtttgaacatgaaatggaggagagcaaaaagaatcgagttgaaatcaatgatgtggagcctgaagtttttaaggaaatgatgtgcttcatttacacggggaaggctccaaacctcgacaaaatggctgatgatttgctggcagctgctgacaagtatgccctggagcgcttaaaggtcatgtgtgaggatgccctctgcagtaacctgtccgtggagaacgctgcagaaattctcatcctggccgacctccacagtgcagatcagttgaaaactcaggcagtggatttcatcaactatcatgcttcggatgtcttggagacctctgggtggaagtcaatggtggtgtcacatccccacttggtggctgaggcataccgctctctggcttcagcacagtgcccttttctgggacccccacgcaaacgcctgaagcaatccggcagcggcagcccggcggcgaaacgcgtgaaactggattacccatacgatgttccagattacgcttaa

SEQ ID NO: 1356 - DNA, 852 bp, synthetic construct
  source 1..852: mol_type = other DNA; note = OMOMYC-(GS)1-CHIP-NLS nucleic acid
atgtctgataccgaggaaaatgtcaagcggagaacccacaacgtgctggaaagacagagacggaatgagctgaagcgctccttcttcgccctgcgggaccagatccccgagctggaaaacaacgagaaggcccctaaggtggtgatcctgaaaaaggctacagcctacatcctgagcgtgcaggccgagacccagaaactgatcagcgagatcgacctgctgagaaagcagaacgagcagctgaagcacaagctggaacaactcagaaacagctgcgccggcagccggctgaacttcggggacgacatccccagcgctcttcgaatcgcgaagaagaagcgctggaacagcattgaggagcggcgcatccaccaggagagcgagctgcactcctacctctccaggctcattgccgcggagcgtgagagggagctggaagagtgccagcgaaaccacgagggtgatgaggacgacagccacgtccgggcccagcaggcctgcattgaggccaagcacgacaagtacatggcggacatggacgagcttttttctcaggtggatgagaagaggaagaagcgagacatccccgactacctgtgtggcaagatcagctttgagctgatgcgggagccgtgcatcacgcccagtggcatcacctacgaccgcaaggacatcgaggagcacctgcagcgtgtgggtcattttgacccggtgaccaggagccccctgacccaggaacagctcatccccaacttggctatgaaggaggttattgacgcattcatctctgagaatggctgggtggaggactacggcagcggcagcccggcggcgaaacgcgtgaaactggat

SEQ ID NO: 1357 - DNA, 858 bp, synthetic construct
  source 1..858: mol_type = other DNA; note = OMOMYC-(GS)2-CHIP-NLS nucleic acid
atgtctgataccgaggaaaatgtcaagcggagaacccacaacgtgctggaaagacagagacggaatgagctgaagcgctccttcttcgccctgcgggaccagatccccgagctggaaaacaacgagaaggcccctaaggtggtgatcctgaaaaaggctacagcctacatcctgagcgtgcaggccgagacccagaaactgatcagcgagatcgacctgctgagaaagcagaacgagcagctgaagcacaagctggaacaactcagaaacagctgcgccggcagcggcagccggctgaacttcggggacgacatccccagcgctcttcgaatcgcgaagaagaagcgctggaacagcattgaggagcggcgcatccaccaggagagcgagctgcactcctacctctccaggctcattgccgcggagcgtgagagggagctggaagagtgccagcgaaaccacgagggtgatgaggacgacagccacgtccgggcccagcaggcctgcattgaggccaagcacgacaagtacatggcggacatggacgagcttttttctcaggtggatgagaagaggaagaagcgagacatccccgactacctgtgtggcaagatcagctttgagctgatgcgggagccgtgcatcacgcccagtggcatcacctacgaccgcaaggacatcgaggagcacctgcagcgtgtgggtcattttgacccggtgaccaggagccccctgacccaggaacagctcatccccaacttggctatgaaggaggttattgacgcattcatctctgagaatggctgggtggaggactacggcagcggcagcccggcggcgaaacgcgtgaaactggat

SEQ ID NO: 1358 - DNA, 864 bp, synthetic construct
  source 1..864: mol_type = other DNA; note = OMOMYC-(GS)3-CHIP-NLS nucleic acid
atgtctgataccgaggaaaatgtcaagcggagaacccacaacgtgctggaaagacagagacggaatgagctgaagcgctccttcttcgccctgcgggaccagatccccgagctggaaaacaacgagaaggcccctaaggtggtgatcctgaaaaaggctacagcctacatcctgagcgtgcaggccgagacccagaaactgatcagcgagatcgacctgctgagaaagcagaacgagcagctgaagcacaagctggaacaactcagaaacagctgcgccggcagcggcagcggcagccggctgaacttcggggacgacatccccagcgctcttcgaatcgcgaagaagaagcgctggaacagcattgaggagcggcgcatccaccaggagagcgagctgcactcctacctctccaggctcattgccgcggagcgtgagagggagctggaagagtgccagcgaaaccacgagggtgatgaggacgacagccacgtccgggcccagcaggcctgcattgaggccaagcacgacaagtacatggcggacatggacgagcttttttctcaggtggatgagaagaggaagaagcgagacatccccgactacctgtgtggcaagatcagctttgagctgatgcgggagccgtgcatcacgcccagtggcatcacctacgaccgcaaggacatcgaggagcacctgcagcgtgtgggtcattttgacccggtgaccaggagccccctgacccaggaacagctcatccccaacttggctatgaaggaggttattgacgcattcatctctgagaatggctgggtggaggactacggcagcggcagcccggcggcgaaacgcgtgaaactggat

SEQ ID NO: 1359 - DNA, 870 bp, synthetic construct
  source 1..870: mol_type = other DNA; note = OMOMYC-(GS)4-CHIP-NLS nucleic acid
atgtctgataccgaggaaaatgtcaagcggagaacccacaacgtgctggaaagacagagacggaatgagctgaagcgctccttcttcgccctgcgggaccagatccccgagctggaaaacaacgagaaggcccctaaggtggtgatcctgaaaaaggctacagcctacatcctgagcgtgcaggccgagacccagaaactgatcagcgagatcgacctgctgagaaagcagaacgagcagctgaagcacaagctggaacaactcagaaacagctgcgccggcagcggcagcggcagcggcagccggctgaacttcggggacgacatccccagcgctcttcgaatcgcgaagaagaagcgctggaacagcattgaggagcggcgcatccaccaggagagcgagctgcactcctacctctccaggctcattgccgcggagcgtgagagggagctggaagagtgccagcgaaaccacgagggtgatgaggacgacagccacgtccgggcccagcaggcctgcattgaggccaagcacgacaagtacatggcggacatggacgagcttttttctcaggtggatgagaagaggaagaagcgagacatccccgactacctgtgtggcaagatcagctttgagctgatgcgggagccgtgcatcacgcccagtggcatcacctacgaccgcaaggacatcgaggagcacctgcagcgtgtgggtcattttgacccggtgaccaggagccccctgacccaggaacagctcatccccaacttggctatgaaggaggttattgacgcattcatctctgagaatggctgggtggaggactacggcagcggcagcccggcggcgaaacgcgtgaaactggat

SEQ ID NO: 1360 - DNA, 876 bp, synthetic construct
  source 1..876: mol_type = other DNA; note = OMOMYC-(GS)5-CHIP-NLS nucleic acid
atgtctgataccgaggaaaatgtcaagcggagaacccacaacgtgctggaaagacagagacggaatgagctgaagcgctccttcttcgccctgcgggaccagatccccgagctggaaaacaacgagaaggcccctaaggtggtgatcctgaaaaaggctacagcctacatcctgagcgtgcaggccgagacccagaaactgatcagcgagatcgacctgctgagaaagcagaacgagcagctgaagcacaagctggaacaactcagaaacagctgcgccggcagcggcagcggcagcggcagcggcagccggctgaacttcggggacgacatccccagcgctcttcgaatcgcgaagaagaagcgctggaacagcattgaggagcggcgcatccaccaggagagcgagctgcactcctacctctccaggctcattgccgcggagcgtgagagggagctggaagagtgccagcgaaaccacgagggtgatgaggacgacagccacgtccgggcccagcaggcctgcattgaggccaagcacgacaagtacatggcggacatggacgagcttttttctcaggtggatgagaagaggaagaagcgagacatccccgactacctgtgtggcaagatcagctttgagctgatgcgggagccgtgcatcacgcccagtggcatcacctacgaccgcaaggacatcgaggagcacctgcagcgtgtgggtcattttgacccggtgaccaggagccccctgacccaggaacagctcatccccaacttggctatgaaggaggttattgacgcattcatctctgagaatggctgggtggaggactacggcagcggcagcccggcggcgaaacgcgtgaaactggat

SEQ ID NO: 1361 - DNA, 882 bp, synthetic construct
  source 1..882: mol_type = other DNA; note = OMOMYC-(GS)6-CHIP-NLS nucleic acid
atgtctgataccgaggaaaatgtcaagcggagaacccacaacgtgctggaaagacagagacggaatgagctgaagcgctccttcttcgccctgcgggaccagatccccgagctggaaaacaacgagaaggcccctaaggtggtgatcctgaaaaaggctacagcctacatcctgagcgtgcaggccgagacccagaaactgatcagcgagatcgacctgctgagaaagcagaacgagcagctgaagcacaagctggaacaactcagaaacagctgcgccggcagcggcagcggcagcggcagcggcagcggcagccggctgaacttcggggacgacatccccagcgctcttcgaatcgcgaagaagaagcgctggaacagcattgaggagcggcgcatccaccaggagagcgagctgcactcctacctctccaggctcattgccgcggagcgtgagagggagctggaagagtgccagcgaaaccacgagggtgatgaggacgacagccacgtccgggcccagcaggcctgcattgaggccaagcacgacaagtacatggcggacatggacgagcttttttctcaggtggatgagaagaggaagaagcgagacatccccgactacctgtgtggcaagatcagctttgagctgatgcgggagccgtgcatcacgcccagtggcatcacctacgaccgcaaggacatcgaggagcacctgcagcgtgtgggtcattttgacccggtgaccaggagccccctgacccaggaacagctcatccccaacttggctatgaaggaggttattgacgcattcatctctgagaatggctgggtggaggactacggcagcggcagcccggcggcgaaacgcgtgaaactggat

SEQ ID NO: 1362 - DNA, 882 bp, synthetic construct
  source 1..882: mol_type = other DNA; note = OMOMYC-(GS)1-CHIP-NLS-HA nucleic acid
atgtctgataccgaggaaaatgtcaagcggagaacccacaacgtgctggaaagacagagacggaatgagctgaagcgctccttcttcgccctgcgggaccagatccccgagctggaaaacaacgagaaggcccctaaggtggtgatcctgaaaaaggctacagcctacatcctgagcgtgcaggccgagacccagaaactgatcagcgagatcgacctgctgagaaagcagaacgagcagctgaagcacaagctggaacaactcagaaacagctgcgccggcagccggctgaacttcggggacgacatccccagcgctcttcgaatcgcgaagaagaagcgctggaacagcattgaggagcggcgcatccaccaggagagcgagctgcactcctacctctccaggctcattgccgcggagcgtgagagggagctggaagagtgccagcgaaaccacgagggtgatgaggacgacagccacgtccgggcccagcaggcctgcattgaggccaagcacgacaagtacatggcggacatggacgagcttttttctcaggtggatgagaagaggaagaagcgagacatccccgactacctgtgtggcaagatcagctttgagctgatgcgggagccgtgcatcacgcccagtggcatcacctacgaccgcaaggacatcgaggagcacctgcagcgtgtgggtcattttgacccggtgaccaggagccccctgacccaggaacagctcatccccaacttggctatgaaggaggttattgacgcattcatctctgagaatggctgggtggaggactacggcagcggcagcccggcggcgaaacgcgtgaaactggattacccatacgatgttccagattacgcttaa

SEQ ID NO: 1363 - DNA, 888 bp, synthetic construct
  source 1..888: mol_type = other DNA; note = OMOMYC-(GS)2-CHIP-NLS-HA nucleic acid
atgtctgataccgaggaaaatgtcaagcggagaacccacaacgtgctggaaagacagagacggaatgagctgaagcgctccttcttcgccctgcgggaccagatccccgagctggaaaacaacgagaaggcccctaaggtggtgatcctgaaaaaggctacagcctacatcctgagcgtgcaggccgagacccagaaactgatcagcgagatcgacctgctgagaaagcagaacgagcagctgaagcacaagctggaacaactcagaaacagctgcgccggcagcggcagccggctgaacttcggggacgacatccccagcgctcttcgaatcgcgaagaagaagcgctggaacagcattgaggagcggcgcatccaccaggagagcgagctgcactcctacctctccaggctcattgccgcggagcgtgagagggagctggaagagtgccagcgaaaccacgagggtgatgaggacgacagccacgtccgggcccagcaggcctgcattgaggccaagcacgacaagtacatggcggacatggacgagcttttttctcaggtggatgagaagaggaagaagcgagacatccccgactacctgtgtggcaagatcagctttgagctgatgcgggagccgtgcatcacgcccagtggcatcacctacgaccgcaaggacatcgaggagcacctgcagcgtgtgggtcattttgacccggtgaccaggagccccctgacccaggaacagctcatccccaacttggctatgaaggaggttattgacgcattcatctctgagaatggctgggtggaggactacggcagcggcagcccggcggcgaaacgcgtgaaactggattacccatacgatgttccagattacgcttaa

SEQ ID NO: 1364 - DNA, 894 bp, synthetic construct
  source 1..894: mol_type = other DNA; note = OMOMYC-(GS)3-CHIP-NLS-HA nucleic acid
atgtctgataccgaggaaaatgtcaagcggagaacccacaacgtgctggaaagacagagacggaatgagctgaagcgctccttcttcgccctgcgggaccagatccccgagctggaaaacaacgagaaggcccctaaggtggtgatcctgaaaaaggctacagcctacatcctgagcgtgcaggccgagacccagaaactgatcagcgagatcgacctgctgagaaagcagaacgagcagctgaagcacaagctggaacaactcagaaacagctgcgccggcagcggcagcggcagccggctgaacttcggggacgacatccccagcgctcttcgaatcgcgaagaagaagcgctggaacagcattgaggagcggcgcatccaccaggagagcgagctgcactcctacctctccaggctcattgccgcggagcgtgagagggagctggaagagtgccagcgaaaccacgagggtgatgaggacgacagccacgtccgggcccagcaggcctgcattgaggccaagcacgacaagtacatggcggacatggacgagcttttttctcaggtggatgagaagaggaagaagcgagacatccccgactacctgtgtggcaagatcagctttgagctgatgcgggagccgtgcatcacgcccagtggcatcacctacgaccgcaaggacatcgaggagcacctgcagcgtgtgggtcattttgacccggtgaccaggagccccctgacccaggaacagctcatccccaacttggctatgaaggaggttattgacgcattcatctctgagaatggctgggtggaggactacggcagcggcagcccggcggcgaaacgcgtgaaactggattacccatacgatgttccagattacgcttaa

SEQ ID NO: 1365 - DNA, 900 bp, synthetic construct
  source 1..900: mol_type = other DNA; note = OMOMYC-(GS)4-CHIP-NLS-HA nucleic acid
atgtctgataccgaggaaaatgtcaagcggagaacccacaacgtgctggaaagacagagacggaatgagctgaagcgctccttcttcgccctgcgggaccagatccccgagctggaaaacaacgagaaggcccctaaggtggtgatcctgaaaaaggctacagcctacatcctgagcgtgcaggccgagacccagaaactgatcagcgagatcgacctgctgagaaagcagaacgagcagctgaagcacaagctggaacaactcagaaacagctgcgccggcagcggcagcggcagcggcagccggctgaacttcggggacgacatccccagcgctcttcgaatcgcgaagaagaagcgctggaacagcattgaggagcggcgcatccaccaggagagcgagctgcactcctacctctccaggctcattgccgcggagcgtgagagggagctggaagagtgccagcgaaaccacgagggtgatgaggacgacagccacgtccgggcccagcaggcctgcattgaggccaagcacgacaagtacatggcggacatggacgagcttttttctcaggtggatgagaagaggaagaagcgagacatccccgactacctgtgtggcaagatcagctttgagctgatgcgggagccgtgcatcacgcccagtggcatcacctacgaccgcaaggacatcgaggagcacctgcagcgtgtgggtcattttgacccggtgaccaggagccccctgacccaggaacagctcatccccaacttggctatgaaggaggttattgacgcattcatctctgagaatggctgggtggaggactacggcagcggcagcccggcggcgaaacgcgtgaaactggattacccatacgatgttccagattacgcttaa

SEQ ID NO: 1366 - DNA, 906 bp, synthetic construct
  source 1..906: mol_type = other DNA; note = OMOMYC-(GS)5-CHIP-NLS-HA nucleic acid
atgtctgataccgaggaaaatgtcaagcggagaacccacaacgtgctggaaagacagagacggaatgagctgaagcgctccttcttcgccctgcgggaccagatccccgagctggaaaacaacgagaaggcccctaaggtggtgatcctgaaaaaggctacagcctacatcctgagcgtgcaggccgagacccagaaactgatcagcgagatcgacctgctgagaaagcagaacgagcagctgaagcacaagctggaacaactcagaaacagctgcgccggcagcggcagcggcagcggcagcggcagccggctgaacttcggggacgacatccccagcgctcttcgaatcgcgaagaagaagcgctggaacagcattgaggagcggcgcatccaccaggagagcgagctgcactcctacctctccaggctcattgccgcggagcgtgagagggagctggaagagtgccagcgaaaccacgagggtgatgaggacgacagccacgtccgggcccagcaggcctgcattgaggccaagcacgacaagtacatggcggacatggacgagcttttttctcaggtggatgagaagaggaagaagcgagacatccccgactacctgtgtggcaagatcagctttgagctgatgcgggagccgtgcatcacgcccagtggcatcacctacgaccgcaaggacatcgaggagcacctgcagcgtgtgggtcattttgacccggtgaccaggagccccctgacccaggaacagctcatccccaacttggctatgaaggaggttattgacgcattcatctctgagaatggctgggtggaggactacggcagcggcagcccggcggcgaaacgcgtgaaactggattacccatacgatgttccagattacgcttaa

SEQ ID NO: 1367 - DNA, 912 bp, synthetic construct
  source 1..912: mol_type = other DNA; note = OMOMYC-(GS)6-CHIP-NLS-HA nucleic acid
atgtctgataccgaggaaaatgtcaagcggagaacccacaacgtgctggaaagacagagacggaatgagctgaagcgctccttcttcgccctgcgggaccagatccccgagctggaaaacaacgagaaggcccctaaggtggtgatcctgaaaaaggctacagcctacatcctgagcgtgcaggccgagacccagaaactgatcagcgagatcgacctgctgagaaagcagaacgagcagctgaagcacaagctggaacaactcagaaacagctgcgccggcagcggcagcggcagcggcagcggcagcggcagccggctgaacttcggggacgacatccccagcgctcttcgaatcgcgaagaagaagcgctggaacagcattgaggagcggcgcatccaccaggagagcgagctgcactcctacctctccaggctcattgccgcggagcgtgagagggagctggaagagtgccagcgaaaccacgagggtgatgaggacgacagccacgtccgggcccagcaggcctgcattgaggccaagcacgacaagtacatggcggacatggacgagcttttttctcaggtggatgagaagaggaagaagcgagacatccccgactacctgtgtggcaagatcagctttgagctgatgcgggagccgtgcatcacgcccagtggcatcacctacgaccgcaaggacatcgaggagcacctgcagcgtgtgggtcattttgacccggtgaccaggagccccctgacccaggaacagctcatccccaacttggctatgaaggaggttattgacgcattcatctctgagaatggctgggtggaggactacggcagcggcagcccggcggcgaaacgcgtgaaactggattacccatacgatgttccagattacgcttaa

SEQ ID NO: 1368 - DNA, 435 bp, synthetic construct
  source 1..435: mol_type = other DNA; note = NLS-DCAF1-(GS)1-OMOMYC nucleic acid
ccggcggcgaaacgcgtgaaactggatggcagcggcagcggcagccaggcgccgattaactttaccagccgcctgaaccgccgcgcgagctttccgaaatatggcggcgtggatggcggctgctttgatcgccatctgatttttagccgcggcagctctgataccgaggaaaatgtcaagcggagaacccacaacgtgctggaaagacagagacggaatgagctgaagcgctccttcttcgccctgcgggaccagatccccgagctggaaaacaacgagaaggcccctaaggtggtgatcctgaaaaaggctacagcctacatcctgagcgtgcaggccgagacccagaaactgatcagcgagatcgacctgctgagaaagcagaacgagcagctgaagcacaagctggaacaactcagaaacagctgcgcctaa

SEQ ID NO: 1369 - DNA, 441 bp, synthetic construct
  source 1..441: mol_type = other DNA; note = NLS-DCAF1-(GS)2-OMOMYC nucleic acid
ccggcggcgaaacgcgtgaaactggatggcagcggcagcggcagccaggcgccgattaactttaccagccgcctgaaccgccgcgcgagctttccgaaatatggcggcgtggatggcggctgctttgatcgccatctgatttttagccgcggcagcggcagctctgataccgaggaaaatgtcaagcggagaacccacaacgtgctggaaagacagagacggaatgagctgaagcgctccttcttcgccctgcgggaccagatccccgagctggaaaacaacgagaaggcccctaaggtggtgatcctgaaaaaggctacagcctacatcctgagcgtgcaggccgagacccagaaactgatcagcgagatcgacctgctgagaaagcagaacgagcagctgaagcacaagctggaacaactcagaaacagctgcgcctaa

SEQ ID NO: 1370 - DNA, 447 bp, synthetic construct
  source 1..447: mol_type = other DNA; note = NLS-DCAF1-(GS)3-OMOMYC nucleic acid
ccggcggcgaaacgcgtgaaactggatggcagcggcagcggcagccaggcgccgattaactttaccagccgcctgaaccgccgcgcgagctttccgaaatatggcggcgtggatggcggctgctttgatcgccatctgatttttagccgcggcagcggcagcggcagctctgataccgaggaaaatgtcaagcggagaacccacaacgtgctggaaagacagagacggaatgagctgaagcgctccttcttcgccctgcgggaccagatccccgagctggaaaacaacgagaaggcccctaaggtggtgatcctgaaaaaggctacagcctacatcctgagcgtgcaggccgagacccagaaactgatcagcgagatcgacctgctgagaaagcagaacgagcagctgaagcacaagctggaacaactcagaaacagctgcgcctaa

SEQ ID NO: 1371 - DNA, 453 bp, synthetic construct
  source 1..453: mol_type = other DNA; note = NLS-DCAF1-(GS)4-OMOMYC nucleic acid
ccggcggcgaaacgcgtgaaactggatggcagcggcagcggcagccaggcgccgattaactttaccagccgcctgaaccgccgcgcgagctttccgaaatatggcggcgtggatggcggctgctttgatcgccatctgatttttagccgcggcagcggcagcggcagcggcagctctgataccgaggaaaatgtcaagcggagaacccacaacgtgctggaaagacagagacggaatgagctgaagcgctccttcttcgccctgcgggaccagatccccgagctggaaaacaacgagaaggcccctaaggtggtgatcctgaaaaaggctacagcctacatcctgagcgtgcaggccgagacccagaaactgatcagcgagatcgacctgctgagaaagcagaacgagcagctgaagcacaagctggaacaactcagaaacagctgcgcctaa

SEQ ID NO: 1372 - DNA, 459 bp, synthetic construct
  source 1..459: mol_type = other DNA; note = NLS-DCAF1-(GS)5-OMOMYC nucleic acid
ccggcggcgaaacgcgtgaaactggatggcagcggcagcggcagccaggcgccgattaactttaccagccgcctgaaccgccgcgcgagctttccgaaatatggcggcgtggatggcggctgctttgatcgccatctgatttttagccgcggcagcggcagcggcagcggcagcggcagctctgataccgaggaaaatgtcaagcggagaacccacaacgtgctggaaagacagagacggaatgagctgaagcgctccttcttcgccctgcgggaccagatccccgagctggaaaacaacgagaaggcccctaaggtggtgatcctgaaaaaggctacagcctacatcctgagcgtgcaggccgagacccagaaactgatcagcgagatcgacctgctgagaaagcagaacgagcagctgaagcacaagctggaacaactcagaaacagctgcgcctaa

SEQ ID NO: 1373 - DNA, 465 bp, synthetic construct
  source 1..465: mol_type = other DNA; note = NLS-DCAF1-(GS)6-OMOMYC nucleic acid
ccggcggcgaaacgcgtgaaactggatggcagcggcagcggcagccaggcgccgattaactttaccagccgcctgaaccgccgcgcgagctttccgaaatatggcggcgtggatggcggctgctttgatcgccatctgatttttagccgcggcagcggcagcggcagcggcagcggcagcggcagctctgataccgaggaaaatgtcaagcggagaacccacaacgtgctggaaagacagagacggaatgagctgaagcgctccttcttcgccctgcgggaccagatccccgagctggaaaacaacgagaaggcccctaaggtggtgatcctgaaaaaggctacagcctacatcctgagcgtgcaggccgagacccagaaactgatcagcgagatcgacctgctgagaaagcagaacgagcagctgaagcacaagctggaacaactcagaaacagctgcgcctaa

SEQ ID NO: 1374 - DNA, 465 bp, synthetic construct
  source 1..465: mol_type = other DNA; note = HA-NLS-DCAF1-(GS)1-OMOMYC nucleic acid
atgtacccatacgatgttccagattacgctccggcggcgaaacgcgtgaaactggatggcagcggcagcggcagccaggcgccgattaactttaccagccgcctgaaccgccgcgcgagctttccgaaatatggcggcgtggatggcggctgctttgatcgccatctgatttttagccgcggcagctctgataccgaggaaaatgtcaagcggagaacccacaacgtgctggaaagacagagacggaatgagctgaagcgctccttcttcgccctgcgggaccagatccccgagctggaaaacaacgagaaggcccctaaggtggtgatcctgaaaaaggctacagcctacatcctgagcgtgcaggccgagacccagaaactgatcagcgagatcgacctgctgagaaagcagaacgagcagctgaagcacaagctggaacaactcagaaacagctgcgcctaa

SEQ ID NO: 1375 - DNA, 471 bp, synthetic construct
  source 1..471: mol_type = other DNA; note = HA-NLS-DCAF1-(GS)2-OMOMYC nucleic acid
atgtacccatacgatgttccagattacgctccggcggcgaaacgcgtgaaactggatggcagcggcagcggcagccaggcgccgattaactttaccagccgcctgaaccgccgcgcgagctttccgaaatatggcggcgtggatggcggctgctttgatcgccatctgatttttagccgcggcagcggcagctctgataccgaggaaaatgtcaagcggagaacccacaacgtgctggaaagacagagacggaatgagctgaagcgctccttcttcgccctgcgggaccagatccccgagctggaaaacaacgagaaggcccctaaggtggtgatcctgaaaaaggctacagcctacatcctgagcgtgcaggccgagacccagaaactgatcagcgagatcgacctgctgagaaagcagaacgagcagctgaagcacaagctggaacaactcagaaacagctgcgcctaa

SEQ ID NO: 1376 - DNA, 477 bp, synthetic construct
  source 1..477: mol_type = other DNA; note = HA-NLS-DCAF1-(GS)3-OMOMYC nucleic acid
atgtacccatacgatgttccagattacgctccggcggcgaaacgcgtgaaactggatggcagcggcagcggcagccaggcgccgattaactttaccagccgcctgaaccgccgcgcgagctttccgaaatatggcggcgtggatggcggctgctttgatcgccatctgatttttagccgcggcagcggcagcggcagctctgataccgaggaaaatgtcaagcggagaacccacaacgtgctggaaagacagagacggaatgagctgaagcgctccttcttcgccctgcgggaccagatccccgagctggaaaacaacgagaaggcccctaaggtggtgatcctgaaaaaggctacagcctacatcctgagcgtgcaggccgagacccagaaactgatcagcgagatcgacctgctgagaaagcagaacgagcagctgaagcacaagctggaacaactcagaaacagctgcgcctaa

SEQ ID NO: 1377 - DNA, 483 bp, synthetic construct
  source 1..483: mol_type = other DNA; note = HA-NLS-DCAF1-(GS)4-OMOMYC nucleic acid
atgtacccatacgatgttccagattacgctccggcggcgaaacgcgtgaaactggatggcagcggcagcggcagccaggcgccgattaactttaccagccgcctgaaccgccgcgcgagctttccgaaatatggcggcgtggatggcggctgctttgatcgccatctgatttttagccgcggcagcggcagcggcagcggcagctctgataccgaggaaaatgtcaagcggagaacccacaacgtgctggaaagacagagacggaatgagctgaagcgctccttcttcgccctgcgggaccagatccccgagctggaaaacaacgagaaggcccctaaggtggtgatcctgaaaaaggctacagcctacatcctgagcgtgcaggccgagacccagaaactgatcagcgagatcgacctgctgagaaagcagaacgagcagctgaagcacaagctggaacaactcagaaacagctgcgcctaa

SEQ ID NO: 1378 - DNA, 489 bp, synthetic construct
  source 1..489: mol_type = other DNA; note = HA-NLS-DCAF1-(GS)5-OMOMYC nucleic acid
atgtacccatacgatgttccagattacgctccggcggcgaaacgcgtgaaactggatggcagcggcagcggcagccaggcgccgattaactttaccagccgcctgaaccgccgcgcgagctttccgaaatatggcggcgtggatggcggctgctttgatcgccatctgatttttagccgcggcagcggcagcggcagcggcagcggcagctctgataccgaggaaaatgtcaagcggagaacccacaacgtgctggaaagacagagacggaatgagctgaagcgctccttcttcgccctgcgggaccagatccccgagctggaaaacaacgagaaggcccctaaggtggtgatcctgaaaaaggctacagcctacatcctgagcgtgcaggccgagacccagaaactgatcagcgagatcgacctgctgagaaagcagaacgagcagctgaagcacaagctggaacaactcagaaacagctgcgcctaa

SEQ ID NO: 1379 - DNA, 495 bp, synthetic construct
  source 1..495: mol_type = other DNA; note = HA-NLS-DCAF1-(GS)6-OMOMYC nucleic acid
atgtacccatacgatgttccagattacgctccggcggcgaaacgcgtgaaactggatggcagcggcagcggcagccaggcgccgattaactttaccagccgcctgaaccgccgcgcgagctttccgaaatatggcggcgtggatggcggctgctttgatcgccatctgatttttagccgcggcagcggcagcggcagcggcagcggcagcggcagctctgataccgaggaaaatgtcaagcggagaacccacaacgtgctggaaagacagagacggaatgagctgaagcgctccttcttcgccctgcgggaccagatccccgagctggaaaacaacgagaaggcccctaaggtggtgatcctgaaaaaggctacagcctacatcctgagcgtgcaggccgagacccagaaactgatcagcgagatcgacctgctgagaaagcagaacgagcagctgaagcacaagctggaacaactcagaaacagctgcgcctaa

SEQ ID NO: 1380 - DNA, 1398 bp, synthetic construct
  source 1..1398: mol_type = other DNA; note = NLS-OMOMYC-(GS)1-E6AP nucleic acid
ccggcggcgaaacgcgtgaaactggatggcagcggcagcggcagctctgataccgaggaaaatgtcaagcggagaacccacaacgtgctggaaagacagagacggaatgagctgaagcgctccttcttcgccctgcgggaccagatccccgagctggaaaacaacgagaaggcccctaaggtggtgatcctgaaaaaggctacagcctacatcctgagcgtgcaggccgagacccagaaactgatcagcgagatcgacctgctgagaaagcagaacgagcagctgaagcacaagctggaacaactcagaaacagctgcgccggcagcaatccatatttgagactcaaagttagacgtgaccatatcatagatgatgcacttgtccggctagagatgatcgctatggaaaatcctgcagacttgaagaagcagttgtatgtggaatttgaaggagaacaaggagttgatgagggaggtgtttccaaagaattttttcagctggttgtggaggaaatcttcaatccagatattggtatgttcacatacgatgaatctacaaaattgttttggtttaatccatcttcttttgaaactgagggtcagtttactctgattggcatagtactgggtctggctatttacaataactgtatactggatgtacattttcccatggttgtctacaggaagctaatggggaaaaaaggaacttttcgtgacttgggagactctcacccagttctatatcagagtttaaaagatttattggagtatgaagggaatgtggaagatgacatgatgatcactttccagatatcacagacagatctttttggtaacccaatgatgtatgatctaaaggaaaatggtgataaaattccaattacaaatgaaaacaggaaggaatttgtcaatctttattctgactacattctcaataaatcagtagaaaaacagttcaaggcttttcggagaggttttcatatggtgaccaatgaatctcccttaaagtacttattcagaccagaagaaattgaattgcttatatgtggaagccggaatctagatttccaagcactagaagaaactacagaatatgacggtggctataccagggactctgttctgattagggagttctgggaaatcgttcattcatttacagatgaacagaaaagactcttcttgcagtttacaacgggcacagacagagcacctgtgggaggactaggaaaattaaagatgattatagccaaaaatggcccagacacagaaaggttacctacatctcatacttgctttaatgtgcttttacttccggaatactcaagcaaagaaaaacttaaagagagattgttgaaggccatcacgtatgccaaaggatttggcatgctgtaa

SEQ ID NO: 1381 - DNA, 1404 bp, synthetic construct
  source 1..1404: mol_type = other DNA; note = NLS-OMOMYC-(GS)2-E6AP nucleic acid
ccggcggcgaaacgcgtgaaactggatggcagcggcagcggcagctctgataccgaggaaaatgtcaagcggagaacccacaacgtgctggaaagacagagacggaatgagctgaagcgctccttcttcgccctgcgggaccagatccccgagctggaaaacaacgagaaggcccctaaggtggtgatcctgaaaaaggctacagcctacatcctgagcgtgcaggccgagacccagaaactgatcagcgagatcgacctgctgagaaagcagaacgagcagctgaagcacaagctggaacaactcagaaacagctgcgccggcagcggcagcaatccatatttgagactcaaagttagacgtgaccatatcatagatgatgcacttgtccggctagagatgatcgctatggaaaatcctgcagacttgaagaagcagttgtatgtggaatttgaaggagaacaaggagttgatgagggaggtgtttccaaagaattttttcagctggttgtggaggaaatcttcaatccagatattggtatgttcacatacgatgaatctacaaaattgttttggtttaatccatcttcttttgaaactgagggtcagtttactctgattggcatagtactgggtctggctatttacaataactgtatactggatgtacattttcccatggttgtctacaggaagctaatggggaaaaaaggaacttttcgtgacttgggagactctcacccagttctatatcagagtttaaaagatttattggagtatgaagggaatgtggaagatgacatgatgatcactttccagatatcacagacagatctttttggtaacccaatgatgtatgatctaaaggaaaatggtgataaaattccaattacaaatgaaaacaggaaggaatttgtcaatctttattctgactacattctcaataaatcagtagaaaaacagttcaaggcttttcggagaggttttcatatggtgaccaatgaatctcccttaaagtacttattcagaccagaagaaattgaattgcttatatgtggaagccggaatctagatttccaagcactagaagaaactacagaatatgacggtggctataccagggactctgttctgattagggagttctgggaaatcgttcattcatttacagatgaacagaaaagactcttcttgcagtttacaacgggcacagacagagcacctgtgggaggactaggaaaattaaagatgattatagccaaaaatggcccagacacagaaaggttacctacatctcatacttgctttaatgtgcttttacttccggaatactcaagcaaagaaaaacttaaagagagattgttgaaggccatcacgtatgccaaaggatttggcatgctgtaa

SEQ ID NO: 1382 - DNA, 1410 bp, synthetic construct
  source 1..1410: mol_type = other DNA; note = NLS-OMOMYC-(GS)3-E6AP nucleic acid
ccggcggcgaaacgcgtgaaactggatggcagcggcagcggcagctctgataccgaggaaaatgtcaagcggagaacccacaacgtgctggaaagacagagacggaatgagctgaagcgctccttcttcgccctgcgggaccagatccccgagctggaaaacaacgagaaggcccctaaggtggtgatcctgaaaaaggctacagcctacatcctgagcgtgcaggccgagacccagaaactgatcagcgagatcgacctgctgagaaagcagaacgagcagctgaagcacaagctggaacaactcagaaacagctgcgccggcagcggcagcggcagcaatccatatttgagactcaaagttagacgtgaccatatcatagatgatgcacttgtccggctagagatgatcgctatggaaaatcctgcagacttgaagaagcagttgtatgtggaatttgaaggagaacaaggagttgatgagggaggtgtttccaaagaattttttcagctggttgtggaggaaatcttcaatccagatattggtatgttcacatacgatgaatctacaaaattgttttggtttaatccatcttcttttgaaactgagggtcagtttactctgattggcatagtactgggtctggctatttacaataactgtatactggatgtacattttcccatggttgtctacaggaagctaatggggaaaaaaggaacttttcgtgacttgggagactctcacccagttctatatcagagtttaaaagatttattggagtatgaagggaatgtggaagatgacatgatgatcactttccagatatcacagacagatctttttggtaacccaatgatgtatgatctaaaggaaaatggtgataaaattccaattacaaatgaaaacaggaaggaatttgtcaatctttattctgactacattctcaataaatcagtagaaaaacagttcaaggcttttcggagaggttttcatatggtgaccaatgaatctcccttaaagtacttattcagaccagaagaaattgaattgcttatatgtggaagccggaatctagatttccaagcactagaagaaactacagaatatgacggtggctataccagggactctgttctgattagggagttctgggaaatcgttcattcatttacagatgaacagaaaagactcttcttgcagtttacaacgggcacagacagagcacctgtgggaggactaggaaaattaaagatgattatagccaaaaatggcccagacacagaaaggttacctacatctcatacttgctttaatgtgcttttacttccggaatactcaagcaaagaaaaacttaaagagagattgttgaaggccatcacgtatgccaaaggatttggcatgctgtaa

SEQ ID NO: 1383 - DNA, 1416 bp, synthetic construct
  source 1..1416: mol_type = other DNA; note = NLS-OMOMYC-(GS)4-E6AP nucleic acid
ccggcggcgaaacgcgtgaaactggatggcagcggcagcggcagctctgataccgaggaaaatgtcaagcggagaacccacaacgtgctggaaagacagagacggaatgagctgaagcgctccttcttcgccctgcgggaccagatccccgagctggaaaacaacgagaaggcccctaaggtggtgatcctgaaaaaggctacagcctacatcctgagcgtgcaggccgagacccagaaactgatcagcgagatcgacctgctgagaaagcagaacgagcagctgaagcacaagctggaacaactcagaaacagctgcgccggcagcggcagcggcagcggcagcaatccatatttgagactcaaagttagacgtgaccatatcatagatgatgcacttgtccggctagagatgatcgctatggaaaatcctgcagacttgaagaagcagttgtatgtggaatttgaaggagaacaaggagttgatgagggaggtgtttccaaagaattttttcagctggttgtggaggaaatcttcaatccagatattggtatgttcacatacgatgaatctacaaaattgttttggtttaatccatcttcttttgaaactgagggtcagtttactctgattggcatagtactgggtctggctatttacaataactgtatactggatgtacattttcccatggttgtctacaggaagctaatggggaaaaaaggaacttttcgtgacttgggagactctcacccagttctatatcagagtttaaaagatttattggagtatgaagggaatgtggaagatgacatgatgatcactttccagatatcacagacagatctttttggtaacccaatgatgtatgatctaaaggaaaatggtgataaaattccaattacaaatgaaaacaggaaggaatttgtcaatctttattctgactacattctcaataaatcagtagaaaaacagttcaaggcttttcggagaggttttcatatggtgaccaatgaatctcccttaaagtacttattcagaccagaagaaattgaattgcttatatgtggaagccggaatctagatttccaagcactagaagaaactacagaatatgacggtggctataccagggactctgttctgattagggagttctgggaaatcgttcattcatttacagatgaacagaaaagactcttcttgcagtttacaacgggcacagacagagcacctgtgggaggactaggaaaattaaagatgattatagccaaaaatggcccagacacagaaaggttacctacatctcatacttgctttaatgtgcttttacttccggaatactcaagcaaagaaaaacttaaagagagattgttgaaggccatcacgtatgccaaaggatttggcatgctgtaa

SEQ ID NO: 1384 - DNA, 1422 bp, synthetic construct
  source 1..1422: mol_type = other DNA; note = NLS-OMOMYC-(GS)5-E6AP nucleic acid
ccggcggcgaaacgcgtgaaactggatggcagcggcagcggcagctctgataccgaggaaaatgtcaagcggagaacccacaacgtgctggaaagacagagacggaatgagctgaagcgctccttcttcgccctgcgggaccagatccccgagctggaaaacaacgagaaggcccctaaggtggtgatcctgaaaaaggctacagcctacatcctgagcgtgcaggccgagacccagaaactgatcagcgagatcgacctgctgagaaagcagaacgagcagctgaagcacaagctggaacaactcagaaacagctgcgccggcagcggcagcggcagcggcagcggcagcaatccatatttgagactcaaagttagacgtgaccatatcatagatgatgcacttgtccggctagagatgatcgctatggaaaatcctgcagacttgaagaagcagttgtatgtggaatttgaaggagaacaaggagttgatgagggaggtgtttccaaagaattttttcagctggttgtggaggaaatcttcaatccagatattggtatgttcacatacgatgaatctacaaaattgttttggtttaatccatcttcttttgaaactgagggtcagtttactctgattggcatagtactgggtctggctatttacaataactgtatactggatgtacattttcccatggttgtctacaggaagctaatggggaaaaaaggaacttttcgtgacttgggagactctcacccagttctatatcagagtttaaaagatttattggagtatgaagggaatgtggaagatgacatgatgatcactttccagatatcacagacagatctttttggtaacccaatgatgtatgatctaaaggaaaatggtgataaaattccaattacaaatgaaaacaggaaggaatttgtcaatctttattctgactacattctcaataaatcagtagaaaaacagttcaaggcttttcggagaggttttcatatggtgaccaatgaatctcccttaaagtacttattcagaccagaagaaattgaattgcttatatgtggaagccggaatctagatttccaagcactagaagaaactacagaatatgacggtggctataccagggactctgttctgattagggagttctgggaaatcgttcattcatttacagatgaacagaaaagactcttcttgcagtttacaacgggcacagacagagcacctgtgggaggactaggaaaattaaagatgattatagccaaaaatggcccagacacagaaaggttacctacatctcatacttgctttaatgtgcttttacttccggaatactcaagcaaagaaaaacttaaagagagattgttgaaggccatcacgtatgccaaaggatttggcatgctgtaa

SEQ ID NO: 1385 - DNA, 1428 bp, synthetic construct
  source 1..1428: mol_type = other DNA; note = NLS-OMOMYC-(GS)6-E6AP nucleic acid
ccggcggcgaaacgcgtgaaactggatggcagcggcagcggcagctctgataccgaggaaaatgtcaagcggagaacccacaacgtgctggaaagacagagacggaatgagctgaagcgctccttcttcgccctgcgggaccagatccccgagctggaaaacaacgagaaggcccctaaggtggtgatcctgaaaaaggctacagcctacatcctgagcgtgcaggccgagacccagaaactgatcagcgagatcgacctgctgagaaagcagaacgagcagctgaagcacaagctggaacaactcagaaacagctgcgccggcagcggcagcggcagcggcagcggcagcggcagcaatccatatttgagactcaaagttagacgtgaccatatcatagatgatgcacttgtccggctagagatgatcgctatggaaaatcctgcagacttgaagaagcagttgtatgtggaatttgaaggagaacaaggagttgatgagggaggtgtttccaaagaattttttcagctggttgtggaggaaatcttcaatccagatattggtatgttcacatacgatgaatctacaaaattgttttggtttaatccatcttcttttgaaactgagggtcagtttactctgattggcatagtactgggtctggctatttacaataactgtatactggatgtacattttcccatggttgtctacaggaagctaatggggaaaaaaggaacttttcgtgacttgggagactctcacccagttctatatcagagtttaaaagatttattggagtatgaagggaatgtggaagatgacatgatgatcactttccagatatcacagacagatctttttggtaacccaatgatgtatgatctaaaggaaaatggtgataaaattccaattacaaatgaaaacaggaaggaatttgtcaatctttattctgactacattctcaataaatcagtagaaaaacagttcaaggcttttcggagaggttttcatatggtgaccaatgaatctcccttaaagtacttattcagaccagaagaaattgaattgcttatatgtggaagccggaatctagatttccaagcactagaagaaactacagaatatgacggtggctataccagggactctgttctgattagggagttctgggaaatcgttcattcatttacagatgaacagaaaagactcttcttgcagtttacaacgggcacagacagagcacctgtgggaggactaggaaaattaaagatgattatagccaaaaatggcccagacacagaaaggttacctacatctcatacttgctttaatgtgcttttacttccggaatactcaagcaaagaaaaacttaaagagagattgttgaaggccatcacgtatgccaaaggatttggcatgctgtaa

SEQ ID NO: 1386 - DNA, 1428 bp, synthetic construct
  source 1..1428: mol_type = other DNA; note = HA-NLS-OMOMYC-(GS)1-E6AP nucleic acid
atgtacccatacgatgttccagattacgctccggcggcgaaacgcgtgaaactggatggcagcggcagcggcagctctgataccgaggaaaatgtcaagcggagaacccacaacgtgctggaaagacagagacggaatgagctgaagcgctccttcttcgccctgcgggaccagatccccgagctggaaaacaacgagaaggcccctaaggtggtgatcctgaaaaaggctacagcctacatcctgagcgtgcaggccgagacccagaaactgatcagcgagatcgacctgctgagaaagcagaacgagcagctgaagcacaagctggaacaactcagaaacagctgcgccggcagcaatccatatttgagactcaaagttagacgtgaccatatcatagatgatgcacttgtccggctagagatgatcgctatggaaaatcctgcagacttgaagaagcagttgtatgtggaatttgaaggagaacaaggagttgatgagggaggtgtttccaaagaattttttcagctggttgtggaggaaatcttcaatccagatattggtatgttcacatacgatgaatctacaaaattgttttggtttaatccatcttcttttgaaactgagggtcagtttactctgattggcatagtactgggtctggctatttacaataactgtatactggatgtacattttcccatggttgtctacaggaagctaatggggaaaaaaggaacttttcgtgacttgggagactctcacccagttctatatcagagtttaaaagatttattggagtatgaagggaatgtggaagatgacatgatgatcactttccagatatcacagacagatctttttggtaacccaatgatgtatgatctaaaggaaaatggtgataaaattccaattacaaatgaaaacaggaaggaatttgtcaatctttattctgactacattctcaataaatcagtagaaaaacagttcaaggcttttcggagaggttttcatatggtgaccaatgaatctcccttaaagtacttattcagaccagaagaaattgaattgcttatatgtggaagccggaatctagatttccaagcactagaagaaactacagaatatgacggtggctataccagggactctgttctgattagggagttctgggaaatcgttcattcatttacagatgaacagaaaagactcttcttgcagtttacaacgggcacagacagagcacctgtgggaggactaggaaaattaaagatgattatagccaaaaatggcccagacacagaaaggttacctacatctcatacttgctttaatgtgcttttacttccggaatactcaagcaaagaaaaacttaaagagagattgttgaaggccatcacgtatgccaaaggatttggcatgctgtaa

SEQ ID NO: 1387 - DNA, 1434 bp, synthetic construct
  source 1..1434: mol_type = other DNA; note = HA-NLS-OMOMYC-(GS)2-E6AP nucleic acid
atgtacccatacgatgttccagattacgctccggcggcgaaacgcgtgaaactggatggcagcggcagcggcagctctgataccgaggaaaatgtcaagcggagaacccacaacgtgctggaaagacagagacggaatgagctgaagcgctccttcttcgccctgcgggaccagatccccgagctggaaaacaacgagaaggcccctaaggtggtgatcctgaaaaaggctacagcctacatcctgagcgtgcaggccgagacccagaaactgatcagcgagatcgacctgctgagaaagcagaacgagcagctgaagcacaagctggaacaactcagaaacagctgcgccggcagcggcagcaatccatatttgagactcaaagttagacgtgaccatatcatagatgatgcacttgtccggctagagatgatcgctatggaaaatcctgcagacttgaagaagcagttgtatgtggaatttgaaggagaacaaggagttgatgagggaggtgtttccaaagaattttttcagctggttgtggaggaaatcttcaatccagatattggtatgttcacatacgatgaatctacaaaattgttttggtttaatccatcttcttttgaaactgagggtcagtttactctgattggcatagtactgggtctggctatttacaataactgtatactggatgtacattttcccatggttgtctacaggaagctaatggggaaaaaaggaacttttcgtgacttgggagactctcacccagttctatatcagagtttaaaagatttattggagtatgaagggaatgtggaagatgacatgatgatcactttccagatatcacagacagatctttttggtaacccaatgatgtatgatctaaaggaaaatggtgataaaattccaattacaaatgaaaacaggaaggaatttgtcaatctttattctgactacattctcaataaatcagtagaaaaacagttcaaggcttttcggagaggttttcatatggtgaccaatgaatctcccttaaagtacttattcagaccagaagaaattgaattgcttatatgtggaagccggaatctagatttccaagcactagaagaaactacagaatatgacggtggctataccagggactctgttctgattagggagttctgggaaatcgttcattcatttacagatgaacagaaaagactcttcttgcagtttacaacgggcacagacagagcacctgtgggaggactaggaaaattaaagatgattatagccaaaaatggcccagacacagaaaggttacctacatctcatacttgctttaatgtgcttttacttccggaatactcaagcaaagaaaaacttaaagagagattgttgaaggccatcacgtatgccaaaggatttggcatgctgtaa

SEQ ID NO: 1388 - DNA, 1440 bp, synthetic construct
  source 1..1440: mol_type = other DNA; note = HA-NLS-OMOMYC-(GS)3-E6AP nucleic acid
atgtacccatacgatgttccagattacgctccggcggcgaaacgcgtgaaactggatggcagcggcagcggcagctctgataccgaggaaaatgtcaagcggagaacccacaacgtgctggaaagacagagacggaatgagctgaagcgctccttcttcgccctgcgggaccagatccccgagctggaaaacaacgagaaggcccctaaggtggtgatcctgaaaaaggctacagcctacatcctgagcgtgcaggccgagacccagaaactgatcagcgagatcgacctgctgagaaagcagaacgagcagctgaagcacaagctggaacaactcagaaacagctgcgccggcagcggcagcggcagcaatccatatttgagactcaaagttagacgtgaccatatcatagatgatgcacttgtccggctagagatgatcgctatggaaaatcctgcagacttgaagaagcagttgtatgtggaatttgaaggagaacaaggagttgatgagggaggtgtttccaaagaattttttcagctggttgtggaggaaatcttcaatccagatattggtatgttcacatacgatgaatctacaaaattgttttggtttaatccatcttcttttgaaactgagggtcagtttactctgattggcatagtactgggtctggctatttacaataactgtatactggatgtacattttcccatggttgtctacaggaagctaatggggaaaaaaggaacttttcgtgacttgggagactctcacccagttctatatcagagtttaaaagatttattggagtatgaagggaatgtggaagatgacatgatgatcactttccagatatcacagacagatctttttggtaacccaatgatgtatgatctaaaggaaaatggtgataaaattccaattacaaatgaaaacaggaaggaatttgtcaatctttattctgactacattctcaataaatcagtagaaaaacagttcaaggcttttcggagaggttttcatatggtgaccaatgaatctcccttaaagtacttattcagaccagaagaaattgaattgcttatatgtggaagccggaatctagatttccaagcactagaagaaactacagaatatgacggtggctataccagggactctgttctgattagggagttctgggaaatcgttcattcatttacagatgaacagaaaagactcttcttgcagtttacaacgggcacagacagagcacctgtgggaggactaggaaaattaaagatgattatagccaaaaatggcccagacacagaaaggttacctacatctcatacttgctttaatgtgcttttacttccggaatactcaagcaaagaaaaacttaaagagagattgttgaaggccatcacgtatgccaaaggatttggcatgctgtaa

SEQ ID NO: 1389 - DNA, 1446 bp, synthetic construct
  source 1..1446: mol_type = other DNA; note = HA-NLS-OMOMYC-(GS)4-E6AP nucleic acid
atgtacccatacgatgttccagattacgctccggcggcgaaacgcgtgaaactggatggcagcggcagcggcagctctgataccgaggaaaatgtcaagcggagaacccacaacgtgctggaaagacagagacggaatgagctgaagcgctccttcttcgccctgcgggaccagatccccgagctggaaaacaacgagaaggcccctaaggtggtgatcctgaaaaaggctacagcctacatcctgagcgtgcaggccgagacccagaaactgatcagcgagatcgacctgctgagaaagcagaacgagcagctgaagcacaagctggaacaactcagaaacagctgcgccggcagcggcagcggcagcggcagcaatccatatttgagactcaaagttagacgtgaccatatcatagatgatgcacttgtccggctagagatgatcgctatggaaaatcctgcagacttgaagaagcagttgtatgtggaatttgaaggagaacaaggagttgatgagggaggtgtttccaaagaattttttcagctggttgtggaggaaatcttcaatccagatattggtatgttcacatacgatgaatctacaaaattgttttggtttaatccatcttcttttgaaactgagggtcagtttactctgattggcatagtactgggtctggctatttacaataactgtatactggatgtacattttcccatggttgtctacaggaagctaatggggaaaaaaggaacttttcgtgacttgggagactctcacccagttctatatcagagtttaaaagatttattggagtatgaagggaatgtggaagatgacatgatgatcactttccagatatcacagacagatctttttggtaacccaatgatgtatgatctaaaggaaaatggtgataaaattccaattacaaatgaaaacaggaaggaatttgtcaatctttattctgactacattctcaataaatcagtagaaaaacagttcaaggcttttcggagaggttttcatatggtgaccaatgaatctcccttaaagtacttattcagaccagaagaaattgaattgcttatatgtggaagccggaatctagatttccaagcactagaagaaactacagaatatgacggtggctataccagggactctgttctgattagggagttctgggaaatcgttcattcatttacagatgaacagaaaagactcttcttgcagtttacaacgggcacagacagagcacctgtgggaggactaggaaaattaaagatgattatagccaaaaatggcccagacacagaaaggttacctacatctcatacttgctttaatgtgcttttacttccggaatactcaagcaaagaaaaacttaaagagagattgttgaaggccatcacgtatgccaaaggatttggcatgctgtaa

SEQ ID NO: 1390 - DNA, 1452 bp, synthetic construct
  source 1..1452: mol_type = other DNA; note = HA-NLS-OMOMYC-(GS)5-E6AP nucleic acid
atgtacccatacgatgttccagattacgctccggcggcgaaacgcgtgaaactggatggcagcggcagcggcagctctgataccgaggaaaatgtcaagcggagaacccacaacgtgctggaaagacagagacggaatgagctgaagcgctccttcttcgccctgcgggaccagatccccgagctggaaaacaacgagaaggcccctaaggtggtgatcctgaaaaaggctacagcctacatcctgagcgtgcaggccgagacccagaaactgatcagcgagatcgacctgctgagaaagcagaacgagcagctgaagcacaagctggaacaactcagaaacagctgcgccggcagcggcagcggcagcggcagcggcagcaatccatatttgagactcaaagttagacgtgaccatatcatagatgatgcacttgtccggctagagatgatcgctatggaaaatcctgcagacttgaagaagcagttgtatgtggaatttgaaggagaacaaggagttgatgagggaggtgtttccaaagaattttttcagctggttgtggaggaaatcttcaatccagatattggtatgttcacatacgatgaatctacaaaattgttttggtttaatccatcttcttttgaaactgagggtcagtttactctgattggcatagtactgggtctggctatttacaataactgtatactggatgtacattttcccatggttgtctacaggaagctaatggggaaaaaaggaacttttcgtgacttgggagactctcacccagttctatatcagagtttaaaagatttattggagtatgaagggaatgtggaagatgacatgatgatcactttccagatatcacagacagatctttttggtaacccaatgatgtatgatctaaaggaaaatggtgataaaattccaattacaaatgaaaacaggaaggaatttgtcaatctttattctgactacattctcaataaatcagtagaaaaacagttcaaggcttttcggagaggttttcatatggtgaccaatgaatctcccttaaagtacttattcagaccagaagaaattgaattgcttatatgtggaagccggaatctagatttccaagcactagaagaaactacagaatatgacggtggctataccagggactctgttctgattagggagttctgggaaatcgttcattcatttacagatgaacagaaaagactcttcttgcagtttacaacgggcacagacagagcacctgtgggaggactaggaaaattaaagatgattatagccaaaaatggcccagacacagaaaggttacctacatctcatacttgctttaatgtgcttttacttccggaatactcaagcaaagaaaaacttaaagagagattgttgaaggccatcacgtatgccaaaggatttggcatgctgtaa

SEQ ID NO: 1391 - DNA, 1458 bp, synthetic construct
  source 1..1458: mol_type = other DNA; note = HA-NLS-OMOMYC-(GS)6-E6AP nucleic acid
atgtacccatacgatgttccagattacgctccggcggcgaaacgcgtgaaactggatggcagcggcagcggcagctctgataccgaggaaaatgtcaagcggagaacccacaacgtgctggaaagacagagacggaatgagctgaagcgctccttcttcgccctgcgggaccagatccccgagctggaaaacaacgagaaggcccctaaggtggtgatcctgaaaaaggctacagcctacatcctgagcgtgcaggccgagacccagaaactgatcagcgagatcgacctgctgagaaagcagaacgagcagctgaagcacaagctggaacaactcagaaacagctgcgccggcagcggcagcggcagcggcagcggcagcggcagcaatccatatttgagactcaaagttagacgtgaccatatcatagatgatgcacttgtccggctagagatgatcgctatggaaaatcctgcagacttgaagaagcagttgtatgtggaatttgaaggagaacaaggagttgatgagggaggtgtttccaaagaattttttcagctggttgtggaggaaatcttcaatccagatattggtatgttcacatacgatgaatctacaaaattgttttggtttaatccatcttcttttgaaactgagggtcagtttactctgattggcatagtactgggtctggctatttacaataactgtatactggatgtacattttcccatggttgtctacaggaagctaatggggaaaaaaggaacttttcgtgacttgggagactctcacccagttctatatcagagtttaaaagatttattggagtatgaagggaatgtggaagatgacatgatgatcactttccagatatcacagacagatctttttggtaacccaatgatgtatgatctaaaggaaaatggtgataaaattccaattacaaatgaaaacaggaaggaatttgtcaatctttattctgactacattctcaataaatcagtagaaaaacagttcaaggcttttcggagaggttttcatatggtgaccaatgaatctcccttaaagtacttattcagaccagaagaaattgaattgcttatatgtggaagccggaatctagatttccaagcactagaagaaactacagaatatgacggtggctataccagggactctgttctgattagggagttctgggaaatcgttcattcatttacagatgaacagaaaagactcttcttgcagtttacaacgggcacagacagagcacctgtgggaggactaggaaaattaaagatgattatagccaaaaatggcccagacacagaaaggttacctacatctcatacttgctttaatgtgcttttacttccggaatactcaagcaaagaaaaacttaaagagagattgttgaaggccatcacgtatgccaaaggatttggcatgctgtaa

SEQ ID NO: 1392 - DNA, 1386 bp, synthetic construct
  source 1..1386: mol_type = other DNA; note = FBXW7a-(GS)1-OMOMYC nucleic acid
aatcaggaactgctctctgtgggcagcaaaagacgacgaactggaggctctctgagaggtaacccttcctcaagccaggtagatgaagaacagatgaatcgtgtggtagaggaggaacagcaacagcaactcagacaacaagaggaggagcacactgcaaggaatggtgaagttgttggagtagaacctagacctggaggccaaaatgattcccagcaaggacagttggaagaaaacaataatagatttatttcggtagatgaggactcctcaggaaaccaagaagaacaagaggaagatgaagaacatgctggtgaacaagatgaggaggatgaggaggaggaggagatggaccaggagagtgacgattttgatcagtctgatgatagtagcagagaagatgaacatacacatactaacagtgtcacgaactccagtagtattgtggacctgcccgttcaccaactctcctccccattctatacaaaaacaacaaaaatgaaaagaaagttggaccatggttctgaggtccgctctttttctttgggaaagaaaccatgcaaagtctcagaatatacaagtaccactgggcttgtaccatgttcagcaacaccaacaacttttggggacctcagagcagccaatggccaagggcaacaacgacgccgaattacatctgtccagccacctacaggcctccaggaatggctaaaaatgtttcagagctggagtggaccagagaaattgcttgctttagatgaactcattgatagttgtgaaccaacacaagtaaaacatatgatgcaagtgatagaaccccagtttcaacgagacttcatttcattgctccctaaagagttggcactctatgtgctttcattcctggaacccaaagacctgctacaagcagctcagacatgtcgctactggagaattttggctgaagacaaccttctctggagagagaaatgcaaagaagaggggattgatgaaccattgcacatcaagagaagaaaagtaataaaaccaggtttcatacacagtccatggaaaagtgcatacatcagacagcacagaattgatactaactcgaggcgaggaggcagctctgataccgaggaaaatgtcaagcggagaacccacaacgtgctggaaagacagagacggaatgagctgaagcgctccttcttcgccctgcgggaccagatccccgagctggaaaacaacgagaaggcccctaaggtggtgatcctgaaaaaggctacagcctacatcctgagcgtgcaggccgagacccagaaactgatcagcgagatcgacctgctgagaaagcagaacgagcagctgaagcacaagctggaacaactcagaaacagctgcgcctaa

SEQ ID NO: 1393 - DNA, 1392 bp, synthetic construct
  source 1..1392: mol_type = other DNA; note = FBXW7a-(GS)2-OMOMYC nucleic acid
aatcaggaactgctctctgtgggcagcaaaagacgacgaactggaggctctctgagaggtaacccttcctcaagccaggtagatgaagaacagatgaatcgtgtggtagaggaggaacagcaacagcaactcagacaacaagaggaggagcacactgcaaggaatggtgaagttgttggagtagaacctagacctggaggccaaaatgattcccagcaaggacagttggaagaaaacaataatagatttatttcggtagatgaggactcctcaggaaaccaagaagaacaagaggaagatgaagaacatgctggtgaacaagatgaggaggatgaggaggaggaggagatggaccaggagagtgacgattttgatcagtctgatgatagtagcagagaagatgaacatacacatactaacagtgtcacgaactccagtagtattgtggacctgcccgttcaccaactctcctccccattctatacaaaaacaacaaaaatgaaaagaaagttggaccatggttctgaggtccgctctttttctttgggaaagaaaccatgcaaagtctcagaatatacaagtaccactgggcttgtaccatgttcagcaacaccaacaacttttggggacctcagagcagccaatggccaagggcaacaacgacgccgaattacatctgtccagccacctacaggcctccaggaatggctaaaaatgtttcagagctggagtggaccagagaaattgcttgctttagatgaactcattgatagttgtgaaccaacacaagtaaaacatatgatgcaagtgatagaaccccagtttcaacgagacttcatttcattgctccctaaagagttggcactctatgtgctttcattcctggaacccaaagacctgctacaagcagctcagacatgtcgctactggagaattttggctgaagacaaccttctctggagagagaaatgcaaagaagaggggattgatgaaccattgcacatcaagagaagaaaagtaataaaaccaggtttcatacacagtccatggaaaagtgcatacatcagacagcacagaattgatactaactcgaggcgaggaggcagcggcagctctgataccgaggaaaatgtcaagcggagaacccacaacgtgctggaaagacagagacggaatgagctgaagcgctccttcttcgccctgcgggaccagatccccgagctggaaaacaacgagaaggcccctaaggtggtgatcctgaaaaaggctacagcctacatcctgagcgtgcaggccgagacccagaaactgatcagcgagatcgacctgctgagaaagcagaacgagcagctgaagcacaagctggaacaactcagaaacagctgcgcctaa

SEQ ID NO: 1394 - DNA, 1398 bp, synthetic construct
  source 1..1398: mol_type = other DNA; note = FBXW7a-(GS)3-OMOMYC nucleic acid
aatcaggaactgctctctgtgggcagcaaaagacgacgaactggaggctctctgagaggtaacccttcctcaagccaggtagatgaagaacagatgaatcgtgtggtagaggaggaacagcaacagcaactcagacaacaagaggaggagcacactgcaaggaatggtgaagttgttggagtagaacctagacctggaggccaaaatgattcccagcaaggacagttggaagaaaacaataatagatttatttcggtagatgaggactcctcaggaaaccaagaagaacaagaggaagatgaagaacatgctggtgaacaagatgaggaggatgaggaggaggaggagatggaccaggagagtgacgattttgatcagtctgatgatagtagcagagaagatgaacatacacatactaacagtgtcacgaactccagtagtattgtggacctgcccgttcaccaactctcctccccattctatacaaaaacaacaaaaatgaaaagaaagttggaccatggttctgaggtccgctctttttctttgggaaagaaaccatgcaaagtctcagaatatacaagtaccactgggcttgtaccatgttcagcaacaccaacaacttttggggacctcagagcagccaatggccaagggcaacaacgacgccgaattacatctgtccagccacctacaggcctccaggaatggctaaaaatgtttcagagctggagtggaccagagaaattgcttgctttagatgaactcattgatagttgtgaaccaacacaagtaaaacatatgatgcaagtgatagaaccccagtttcaacgagacttcatttcattgctccctaaagagttggcactctatgtgctttcattcctggaacccaaagacctgctacaagcagctcagacatgtcgctactggagaattttggctgaagacaaccttctctggagagagaaatgcaaagaagaggggattgatgaaccattgcacatcaagagaagaaaagtaataaaaccaggtttcatacacagtccatggaaaagtgcatacatcagacagcacagaattgatactaactcgaggcgaggaggcagcggcagcggcagctctgataccgaggaaaatgtcaagcggagaacccacaacgtgctggaaagacagagacggaatgagctgaagcgctccttcttcgccctgcgggaccagatccccgagctggaaaacaacgagaaggcccctaaggtggtgatcctgaaaaaggctacagcctacatcctgagcgtgcaggccgagacccagaaactgatcagcgagatcgacctgctgagaaagcagaacgagcagctgaagcacaagctggaacaactcagaaacagctgcgcctaa

SEQ ID NO: 1395 - DNA, 1404 bp, synthetic construct
  source 1..1404: mol_type = other DNA; note = FBXW7a-(GS)4-OMOMYC nucleic acid
aatcaggaactgctctctgtgggcagcaaaagacgacgaactggaggctctctgagaggtaacccttcctcaagccaggtagatgaagaacagatgaatcgtgtggtagaggaggaacagcaacagcaactcagacaacaagaggaggagcacactgcaaggaatggtgaagttgttggagtagaacctagacctggaggccaaaatgattcccagcaaggacagttggaagaaaacaataatagatttatttcggtagatgaggactcctcaggaaaccaagaagaacaagaggaagatgaagaacatgctggtgaacaagatgaggaggatgaggaggaggaggagatggaccaggagagtgacgattttgatcagtctgatgatagtagcagagaagatgaacatacacatactaacagtgtcacgaactccagtagtattgtggacctgcccgttcaccaactctcctccccattctatacaaaaacaacaaaaatgaaaagaaagttggaccatggttctgaggtccgctctttttctttgggaaagaaaccatgcaaagtctcagaatatacaagtaccactgggcttgtaccatgttcagcaacaccaacaacttttggggacctcagagcagccaatggccaagggcaacaacgacgccgaattacatctgtccagccacctacaggcctccaggaatggctaaaaatgtttcagagctggagtggaccagagaaattgcttgctttagatgaactcattgatagttgtgaaccaacacaagtaaaacatatgatgcaagtgatagaaccccagtttcaacgagacttcatttcattgctccctaaagagttggcactctatgtgctttcattcctggaacccaaagacctgctacaagcagctcagacatgtcgctactggagaattttggctgaagacaaccttctctggagagagaaatgcaaagaagaggggattgatgaaccattgcacatcaagagaagaaaagtaataaaaccaggtttcatacacagtccatggaaaagtgcatacatcagacagcacagaattgatactaactcgaggcgaggaggcagcggcagcggcagcggcagctctgataccgaggaaaatgtcaagcggagaacccacaacgtgctggaaagacagagacggaatgagctgaagcgctccttcttcgccctgcgggaccagatccccgagctggaaaacaacgagaaggcccctaaggtggtgatcctgaaaaaggctacagcctacatcctgagcgtgcaggccgagacccagaaactgatcagcgagatcgacctgctgagaaagcagaacgagcagctgaagcacaagctggaacaactcagaaacagctgcgcctaa

SEQ ID NO: 1396 - DNA, 1410 bp, synthetic construct
  source 1..1410: mol_type = other DNA; note = FBXW7a-(GS)5-OMOMYC nucleic acid
aatcaggaactgctctctgtgggcagcaaaagacgacgaactggaggctctctgagaggtaacccttcctcaagccaggtagatgaagaacagatgaatcgtgtggtagaggaggaacagcaacagcaactcagacaacaagaggaggagcacactgcaaggaatggtgaagttgttggagtagaacctagacctggaggccaaaatgattcccagcaaggacagttggaagaaaacaataatagatttatttcggtagatgaggactcctcaggaaaccaagaagaacaagaggaagatgaagaacatgctggtgaacaagatgaggaggatgaggaggaggaggagatggaccaggagagtgacgattttgatcagtctgatgatagtagcagagaagatgaacatacacatactaacagtgtcacgaactccagtagtattgtggacctgcccgttcaccaactctcctccccattctatacaaaaacaacaaaaatgaaaagaaagttggaccatggttctgaggtccgctctttttctttgggaaagaaaccatgcaaagtctcagaatatacaagtaccactgggcttgtaccatgttcagcaacaccaacaacttttggggacctcagagcagccaatggccaagggcaacaacgacgccgaattacatctgtccagccacctacaggcctccaggaatggctaaaaatgtttcagagctggagtggaccagagaaattgcttgctttagatgaactcattgatagttgtgaaccaacacaagtaaaacatatgatgcaagtgatagaaccccagtttcaacgagacttcatttcattgctccctaaagagttggcactctatgtgctttcattcctggaacccaaagacctgctacaagcagctcagacatgtcgctactggagaattttggctgaagacaaccttctctggagagagaaatgcaaagaagaggggattgatgaaccattgcacatcaagagaagaaaagtaataaaaccaggtttcatacacagtccatggaaaagtgcatacatcagacagcacagaattgatactaactcgaggcgaggaggcagcggcagcggcagcggcagcggcagctctgataccgaggaaaatgtcaagcggagaacccacaacgtgctggaaagacagagacggaatgagctgaagcgctccttcttcgccctgcgggaccagatccccgagctggaaaacaacgagaaggcccctaaggtggtgatcctgaaaaaggctacagcctacatcctgagcgtgcaggccgagacccagaaactgatcagcgagatcgacctgctgagaaagcagaacgagcagctgaagcacaagctggaacaactcagaaacagctgcgcctaa

SEQ ID NO: 1397 - DNA, 1416 bp, synthetic construct
  source 1..1416: mol_type = other DNA; note = FBXW7a-(GS)6-OMOMYC nucleic acid
aatcaggaactgctctctgtgggcagcaaaagacgacgaactggaggctctctgagaggtaacccttcctcaagccaggtagatgaagaacagatgaatcgtgtggtagaggaggaacagcaacagcaactcagacaacaagaggaggagcacactgcaaggaatggtgaagttgttggagtagaacctagacctggaggccaaaatgattcccagcaaggacagttggaagaaaacaataatagatttatttcggtagatgaggactcctcaggaaaccaagaagaacaagaggaagatgaagaacatgctggtgaacaagatgaggaggatgaggaggaggaggagatggaccaggagagtgacgattttgatcagtctgatgatagtagcagagaagatgaacatacacatactaacagtgtcacgaactccagtagtattgtggacctgcccgttcaccaactctcctccccattctatacaaaaacaacaaaaatgaaaagaaagttggaccatggttctgaggtccgctctttttctttgggaaagaaaccatgcaaagtctcagaatatacaagtaccactgggcttgtaccatgttcagcaacaccaacaacttttggggacctcagagcagccaatggccaagggcaacaacgacgccgaattacatctgtccagccacctacaggcctccaggaatggctaaaaatgtttcagagctggagtggaccagagaaattgcttgctttagatgaactcattgatagttgtgaaccaacacaagtaaaacatatgatgcaagtgatagaaccccagtttcaacgagacttcatttcattgctccctaaagagttggcactctatgtgctttcattcctggaacccaaagacctgctacaagcagctcagacatgtcgctactggagaattttggctgaagacaaccttctctggagagagaaatgcaaagaagaggggattgatgaaccattgcacatcaagagaagaaaagtaataaaaccaggtttcatacacagtccatggaaaagtgcatacatcagacagcacagaattgatactaactcgaggcgaggaggcagcggcagcggcagcggcagcggcagcggcagctctgataccgaggaaaatgtcaagcggagaacccacaacgtgctggaaagacagagacggaatgagctgaagcgctccttcttcgccctgcgggaccagatccccgagctggaaaacaacgagaaggcccctaaggtggtgatcctgaaaaaggctacagcctacatcctgagcgtgcaggccgagacccagaaactgatcagcgagatcgacctgctgagaaagcagaacgagcagctgaagcacaagctggaacaactcagaaacagctgcgcctaa

SEQ ID NO: 1398 - DNA, 1416 bp, synthetic construct
  source 1..1416: mol_type = other DNA; note = HA-FBXW7a-(GS)1-OMOMYC nucleic acid
atgtacccatacgatgttccagattacgctaatcaggaactgctctctgtgggcagcaaaagacgacgaactggaggctctctgagaggtaacccttcctcaagccaggtagatgaagaacagatgaatcgtgtggtagaggaggaacagcaacagcaactcagacaacaagaggaggagcacactgcaaggaatggtgaagttgttggagtagaacctagacctggaggccaaaatgattcccagcaaggacagttggaagaaaacaataatagatttatttcggtagatgaggactcctcaggaaaccaagaagaacaagaggaagatgaagaacatgctggtgaacaagatgaggaggatgaggaggaggaggagatggaccaggagagtgacgattttgatcagtctgatgatagtagcagagaagatgaacatacacatactaacagtgtcacgaactccagtagtattgtggacctgcccgttcaccaactctcctccccattctatacaaaaacaacaaaaatgaaaagaaagttggaccatggttctgaggtccgctctttttctttgggaaagaaaccatgcaaagtctcagaatatacaagtaccactgggcttgtaccatgttcagcaacaccaacaacttttggggacctcagagcagccaatggccaagggcaacaacgacgccgaattacatctgtccagccacctacaggcctccaggaatggctaaaaatgtttcagagctggagtggaccagagaaattgcttgctttagatgaactcattgatagttgtgaaccaacacaagtaaaacatatgatgcaagtgatagaaccccagtttcaacgagacttcatttcattgctccctaaagagttggcactctatgtgctttcattcctggaacccaaagacctgctacaagcagctcagacatgtcgctactggagaattttggctgaagacaaccttctctggagagagaaatgcaaagaagaggggattgatgaaccattgcacatcaagagaagaaaagtaataaaaccaggtttcatacacagtccatggaaaagtgcatacatcagacagcacagaattgatactaactcgaggcgaggaggcagctctgataccgaggaaaatgtcaagcggagaacccacaacgtgctggaaagacagagacggaatgagctgaagcgctccttcttcgccctgcgggaccagatccccgagctggaaaacaacgagaaggcccctaaggtggtgatcctgaaaaaggctacagcctacatcctgagcgtgcaggccgagacccagaaactgatcagcgagatcgacctgctgagaaagcagaacgagcagctgaagcacaagctggaacaactcagaaacagctgcgcctaa

SEQ ID NO: 1399 - DNA, 1422 bp, synthetic construct
  source 1..1422: mol_type = other DNA; note = HA-FBXW7a-(GS)2-OMOMYC nucleic acid
atgtacccatacgatgttccagattacgctaatcaggaactgctctctgtgggcagcaaaagacgacgaactggaggctctctgagaggtaacccttcctcaagccaggtagatgaagaacagatgaatcgtgtggtagaggaggaacagcaacagcaactcagacaacaagaggaggagcacactgcaaggaatggtgaagttgttggagtagaacctagacctggaggccaaaatgattcccagcaaggacagttggaagaaaacaataatagatttatttcggtagatgaggactcctcaggaaaccaagaagaacaagaggaagatgaagaacatgctggtgaacaagatgaggaggatgaggaggaggaggagatggaccaggagagtgacgattttgatcagtctgatgatagtagcagagaagatgaacatacacatactaacagtgtcacgaactccagtagtattgtggacctgcccgttcaccaactctcctccccattctatacaaaaacaacaaaaatgaaaagaaagttggaccatggttctgaggtccgctctttttctttgggaaagaaaccatgcaaagtctcagaatatacaagtaccactgggcttgtaccatgttcagcaacaccaacaacttttggggacctcagagcagccaatggccaagggcaacaacgacgccgaattacatctgtccagccacctacaggcctccaggaatggctaaaaatgtttcagagctggagtggaccagagaaattgcttgctttagatgaactcattgatagttgtgaaccaacacaagtaaaacatatgatgcaagtgatagaaccccagtttcaacgagacttcatttcattgctccctaaagagttggcactctatgtgctttcattcctggaacccaaagacctgctacaagcagctcagacatgtcgctactggagaattttggctgaagacaaccttctctggagagagaaatgcaaagaagaggggattgatgaaccattgcacatcaagagaagaaaagtaataaaaccaggtttcatacacagtccatggaaaagtgcatacatcagacagcacagaattgatactaactcgaggcgaggaggcagcggcagctctgataccgaggaaaatgtcaagcggagaacccacaacgtgctggaaagacagagacggaatgagctgaagcgctccttcttcgccctgcgggaccagatccccgagctggaaaacaacgagaaggcccctaaggtggtgatcctgaaaaaggctacagcctacatcctgagcgtgcaggccgagacccagaaactgatcagcgagatcgacctgctgagaaagcagaacgagcagctgaagcacaagctggaacaactcagaaacagctgcgcctaa

SEQ ID NO: 1400 - DNA, 1428 bp, synthetic construct
  source 1..1428: mol_type = other DNA; note = HA-FBXW7a-(GS)3-OMOMYC nucleic acid
atgtacccatacgatgttccagattacgctaatcaggaactgctctctgtgggcagcaaaagacgacgaactggaggctctctgagaggtaacccttcctcaagccaggtagatgaagaacagatgaatcgtgtggtagaggaggaacagcaacagcaactcagacaacaagaggaggagcacactgcaaggaatggtgaagttgttggagtagaacctagacctggaggccaaaatgattcccagcaaggacagttggaagaaaacaataatagatttatttcggtagatgaggactcctcaggaaaccaagaagaacaagaggaagatgaagaacatgctggtgaacaagatgaggaggatgaggaggaggaggagatggaccaggagagtgacgattttgatcagtctgatgatagtagcagagaagatgaacatacacatactaacagtgtcacgaactccagtagtattgtggacctgcccgttcaccaactctcctccccattctatacaaaaacaacaaaaatgaaaagaaagttggaccatggttctgaggtccgctctttttctttgggaaagaaaccatgcaaagtctcagaatatacaagtaccactgggcttgtaccatgttcagcaacaccaacaacttttggggacctcagagcagccaatggccaagggcaacaacgacgccgaattacatctgtccagccacctacaggcctccaggaatggctaaaaatgtttcagagctggagtggaccagagaaattgcttgctttagatgaactcattgatagttgtgaaccaacacaagtaaaacatatgatgcaagtgatagaaccccagtttcaacgagacttcatttcattgctccctaaagagttggcactctatgtgctttcattcctggaacccaaagacctgctacaagcagctcagacatgtcgctactggagaattttggctgaagacaaccttctctggagagagaaatgcaaagaagaggggattgatgaaccattgcacatcaagagaagaaaagtaataaaaccaggtttcatacacagtccatggaaaagtgcatacatcagacagcacagaattgatactaactcgaggcgaggaggcagcggcagcggcagctctgataccgaggaaaatgtcaagcggagaacccacaacgtgctggaaagacagagacggaatgagctgaagcgctccttcttcgccctgcgggaccagatccccgagctggaaaacaacgagaaggcccctaaggtggtgatcctgaaaaaggctacagcctacatcctgagcgtgcaggccgagacccagaaactgatcagcgagatcgacctgctgagaaagcagaacgagcagctgaagcacaagctggaacaactcagaaacagctgcgcctaa

SEQ ID NO: 1401 - DNA, 1434 bp, synthetic construct
  source 1..1434: mol_type = other DNA; note = HA-FBXW7a-(GS)4-OMOMYC nucleic acid
atgtacccatacgatgttccagattacgctaatcaggaactgctctctgtgggcagcaaaagacgacgaactggaggctctctgagaggtaacccttcctcaagccaggtagatgaagaacagatgaatcgtgtggtagaggaggaacagcaacagcaactcagacaacaagaggaggagcacactgcaaggaatggtgaagttgttggagtagaacctagacctggaggccaaaatgattcccagcaaggacagttggaagaaaacaataatagatttatttcggtagatgaggactcctcaggaaaccaagaagaacaagaggaagatgaagaacatgctggtgaacaagatgaggaggatgaggaggaggaggagatggaccaggagagtgacgattttgatcagtctgatgatagtagcagagaagatgaacatacacatactaacagtgtcacgaactccagtagtattgtggacctgcccgttcaccaactctcctccccattctatacaaaaacaacaaaaatgaaaagaaagttggaccatggttctgaggtccgctctttttctttgggaaagaaaccatgcaaagtctcagaatatacaagtaccactgggcttgtaccatgttcagcaacaccaacaacttttggggacctcagagcagccaatggccaagggcaacaacgacgccgaattacatctgtccagccacctacaggcctccaggaatggctaaaaatgtttcagagctggagtggaccagagaaattgcttgctttagatgaactcattgatagttgtgaaccaacacaagtaaaacatatgatgcaagtgatagaaccccagtttcaacgagacttcatttcattgctccctaaagagttggcactctatgtgctttcattcctggaacccaaagacctgctacaagcagctcagacatgtcgctactggagaattttggctgaagacaaccttctctggagagagaaatgcaaagaagaggggattgatgaaccattgcacatcaagagaagaaaagtaataaaaccaggtttcatacacagtccatggaaaagtgcatacatcagacagcacagaattgatactaactcgaggcgaggaggcagcggcagcggcagcggcagctctgataccgaggaaaatgtcaagcggagaacccacaacgtgctggaaagacagagacggaatgagctgaagcgctccttcttcgccctgcgggaccagatccccgagctggaaaacaacgagaaggcccctaaggtggtgatcctgaaaaaggctacagcctacatcctgagcgtgcaggccgagacccagaaactgatcagcgagatcgacctgctgagaaagcagaacgagcagctgaagcacaagctggaacaactcagaaacagctgcgcctaa

SEQ ID NO: 1402 - DNA, 1440 bp, synthetic construct
  source 1..1440: mol_type = other DNA; note = HA-FBXW7a-(GS)5-OMOMYC nucleic acid
atgtacccatacgatgttccagattacgctaatcaggaactgctctctgtgggcagcaaaagacgacgaactggaggctctctgagaggtaacccttcctcaagccaggtagatgaagaacagatgaatcgtgtggtagaggaggaacagcaacagcaactcagacaacaagaggaggagcacactgcaaggaatggtgaagttgttggagtagaacctagacctggaggccaaaatgattcccagcaaggacagttggaagaaaacaataatagatttatttcggtagatgaggactcctcaggaaaccaagaagaacaagaggaagatgaagaacatgctggtgaacaagatgaggaggatgaggaggaggaggagatggaccaggagagtgacgattttgatcagtctgatgatagtagcagagaagatgaacatacacatactaacagtgtcacgaactccagtagtattgtggacctgcccgttcaccaactctcctccccattctatacaaaaacaacaaaaatgaaaagaaagttggaccatggttctgaggtccgctctttttctttgggaaagaaaccatgcaaagtctcagaatatacaagtaccactgggcttgtaccatgttcagcaacaccaacaacttttggggacctcagagcagccaatggccaagggcaacaacgacgccgaattacatctgtccagccacctacaggcctccaggaatggctaaaaatgtttcagagctggagtggaccagagaaattgcttgctttagatgaactcattgatagttgtgaaccaacacaagtaaaacatatgatgcaagtgatagaaccccagtttcaacgagacttcatttcattgctccctaaagagttggcactctatgtgctttcattcctggaacccaaagacctgctacaagcagctcagacatgtcgctactggagaattttggctgaagacaaccttctctggagagagaaatgcaaagaagaggggattgatgaaccattgcacatcaagagaagaaaagtaataaaaccaggtttcatacacagtccatggaaaagtgcatacatcagacagcacagaattgatactaactcgaggcgaggaggcagcggcagcggcagcggcagcggcagctctgataccgaggaaaatgtcaagcggagaacccacaacgtgctggaaagacagagacggaatgagctgaagcgctccttcttcgccctgcgggaccagatccccgagctggaaaacaacgagaaggcccctaaggtggtgatcctgaaaaaggctacagcctacatcctgagcgtgcaggccgagacccagaaactgatcagcgagatcgacctgctgagaaagcagaacgagcagctgaagcacaagctggaacaactcagaaacagctgcgcctaa

SEQ ID NO: 1403 - DNA, 1446 bp, synthetic construct
  source 1..1446: mol_type = other DNA; note = HA-FBXW7a-(GS)6-OMOMYC nucleic acid
atgtacccatacgatgttccagattacgctaatcaggaactgctctctgtgggcagcaaaagacgacgaactggaggctctctgagaggtaacccttcctcaagccaggtagatgaagaacagatgaatcgtgtggtagaggaggaacagcaacagcaactcagacaacaagaggaggagcacactgcaaggaatggtgaagttgttggagtagaacctagacctggaggccaaaatgattcccagcaaggacagttggaagaaaacaataatagatttatttcggtagatgaggactcctcaggaaaccaagaagaacaagaggaagatgaagaacatgctggtgaacaagatgaggaggatgaggaggaggaggagatggaccaggagagtgacgattttgatcagtctgatgatagtagcagagaagatgaacatacacatactaacagtgtcacgaactccagtagtattgtggacctgcccgttcaccaactctcctccccattctatacaaaaacaacaaaaatgaaaagaaagttggaccatggttctgaggtccgctctttttctttgggaaagaaaccatgcaaagtctcagaatatacaagtaccactgggcttgtaccatgttcagcaacaccaacaacttttggggacctcagagcagccaatggccaagggcaacaacgacgccgaattacatctgtccagccacctacaggcctccaggaatggctaaaaatgtttcagagctggagtggaccagagaaattgcttgctttagatgaactcattgatagttgtgaaccaacacaagtaaaacatatgatgcaagtgatagaaccccagtttcaacgagacttcatttcattgctccctaaagagttggcactctatgtgctttcattcctggaacccaaagacctgctacaagcagctcagacatgtcgctactggagaattttggctgaagacaaccttctctggagagagaaatgcaaagaagaggggattgatgaaccattgcacatcaagagaagaaaagtaataaaaccaggtttcatacacagtccatggaaaagtgcatacatcagacagcacagaattgatactaactcgaggcgaggaggcagcggcagcggcagcggcagcggcagcggcagctctgataccgaggaaaatgtcaagcggagaacccacaacgtgctggaaagacagagacggaatgagctgaagcgctccttcttcgccctgcgggaccagatccccgagctggaaaacaacgagaaggcccctaaggtggtgatcctgaaaaaggctacagcctacatcctgagcgtgcaggccgagacccagaaactgatcagcgagatcgacctgctgagaaagcagaacgagcagctgaagcacaagctggaacaactcagaaacagctgcgcctaa

SEQ ID NO: 1404 - DNA, 1293 bp, synthetic construct
  source 1..1293: mol_type = other DNA; note = NLS-Keap1-(GS)1-OMOMYC nucleic acid
ccggcggcgaaacgcgtgaaactggatggcagcggcagcggcagccagccagatcccaggcctagcggggctggggcctgctgccgattcctgcccctgcagtcacagtgccctgagggggcaggggacgcggtgatgtacgcctccactgagtgcaaggcggaggtgacgccctcccagcatggcaaccgcaccttcagctacaccctggaggatcataccaagcaggcctttggcatcatgaacgagctgcggctcagccagcagctgtgtgacgtcacactgcaggtcaagtaccaggatgcaccggccgcccagttcatggcccacaaggtggtgctggcctcatccagccctgtcttcaaggccatgttcaccaacgggctgcgggagcagggcatggaggtggtgtccattgagggtatccaccccaaggtcatggagcgcctcattgaattcgcctacacggcctccatctccatgggcgagaagtgtgtcctccacgtcatgaacggtgctgtcatgtaccagatcgacagcgttgtccgtgcctgcagtgacttcctggtgcagcagctggaccccagcaatgccatcggcatcgccaacttcgctgagcagattggctgtgtggagttgcaccagcgtgcccgggagtacatctacatgcattttggggaggtggccaagcaagaggagttcttcaacctgtcccactgccaactggtgaccctcatcagccgggacgacctgaacgtgcgctgcgagtccgaggtcttccacgcctgcatcaactgggtcaagtacgactgcgaacagcgacggttctacgtccaggcgctgctgcgggccgtgcgctgccactcgttgacgccgaacttcctgcagatgcagctgcagaagtgcgagatcctgcagtccgactcccgctgcaaggactacctggtcaagatcttcgaggagctcaccctgcacaagcccacgcaggtgatgccctgccgggcgcccggcagctctgataccgaggaaaatgtcaagcggagaacccacaacgtgctggaaagacagagacggaatgagctgaagcgctccttcttcgccctgcgggaccagatccccgagctggaaaacaacgagaaggcccctaaggtggtgatcctgaaaaaggctacagcctacatcctgagcgtgcaggccgagacccagaaactgatcagcgagatcgacctgctgagaaagcagaacgagcagctgaagcacaagctggaacaactcagaaacagctgcgcctaa

SEQ ID NO: 1405 - DNA, 1299 bp, synthetic construct
  source 1..1299: mol_type = other DNA; note = NLS-Keap1-(GS)2-OMOMYC nucleic acid
ccggcggcgaaacgcgtgaaactggatggcagcggcagcggcagccagccagatcccaggcctagcggggctggggcctgctgccgattcctgcccctgcagtcacagtgccctgagggggcaggggacgcggtgatgtacgcctccactgagtgcaaggcggaggtgacgccctcccagcatggcaaccgcaccttcagctacaccctggaggatcataccaagcaggcctttggcatcatgaacgagctgcggctcagccagcagctgtgtgacgtcacactgcaggtcaagtaccaggatgcaccggccgcccagttcatggcccacaaggtggtgctggcctcatccagccctgtcttcaaggccatgttcaccaacgggctgcgggagcagggcatggaggtggtgtccattgagggtatccaccccaaggtcatggagcgcctcattgaattcgcctacacggcctccatctccatgggcgagaagtgtgtcctccacgtcatgaacggtgctgtcatgtaccagatcgacagcgttgtccgtgcctgcagtgacttcctggtgcagcagctggaccccagcaatgccatcggcatcgccaacttcgctgagcagattggctgtgtggagttgcaccagcgtgcccgggagtacatctacatgcattttggggaggtggccaagcaagaggagttcttcaacctgtcccactgccaactggtgaccctcatcagccgggacgacctgaacgtgcgctgcgagtccgaggtcttccacgcctgcatcaactgggtcaagtacgactgcgaacagcgacggttctacgtccaggcgctgctgcgggccgtgcgctgccactcgttgacgccgaacttcctgcagatgcagctgcagaagtgcgagatcctgcagtccgactcccgctgcaaggactacctggtcaagatcttcgaggagctcaccctgcacaagcccacgcaggtgatgccctgccgggcgcccggcagcggcagctctgataccgaggaaaatgtcaagcggagaacccacaacgtgctggaaagacagagacggaatgagctgaagcgctccttcttcgccctgcgggaccagatccccgagctggaaaacaacgagaaggcccctaaggtggtgatcctgaaaaaggctacagcctacatcctgagcgtgcaggccgagacccagaaactgatcagcgagatcgacctgctgagaaagcagaacgagcagctgaagcacaagctggaacaactcagaaacagctgcgcctaa

SEQ ID NO: 1406 - DNA, 1305 bp, synthetic construct
  source 1..1305: mol_type = other DNA; note = NLS-Keap1-(GS)3-OMOMYC nucleic acid
ccggcggcgaaacgcgtgaaactggatggcagcggcagcggcagccagccagatcccaggcctagcggggctggggcctgctgccgattcctgcccctgcagtcacagtgccctgagggggcaggggacgcggtgatgtacgcctccactgagtgcaaggcggaggtgacgccctcccagcatggcaaccgcaccttcagctacaccctggaggatcataccaagcaggcctttggcatcatgaacgagctgcggctcagccagcagctgtgtgacgtcacactgcaggtcaagtaccaggatgcaccggccgcccagttcatggcccacaaggtggtgctggcctcatccagccctgtcttcaaggccatgttcaccaacgggctgcgggagcagggcatggaggtggtgtccattgagggtatccaccccaaggtcatggagcgcctcattgaattcgcctacacggcctccatctccatgggcgagaagtgtgtcctccacgtcatgaacggtgctgtcatgtaccagatcgacagcgttgtccgtgcctgcagtgacttcctggtgcagcagctggaccccagcaatgccatcggcatcgccaacttcgctgagcagattggctgtgtggagttgcaccagcgtgcccgggagtacatctacatgcattttggggaggtggccaagcaagaggagttcttcaacctgtcccactgccaactggtgaccctcatcagccgggacgacctgaacgtgcgctgcgagtccgaggtcttccacgcctgcatcaactgggtcaagtacgactgcgaacagcgacggttctacgtccaggcgctgctgcgggccgtgcgctgccactcgttgacgccgaacttcctgcagatgcagctgcagaagtgcgagatcctgcagtccgactcccgctgcaaggactacctggtcaagatcttcgaggagctcaccctgcacaagcccacgcaggtgatgccctgccgggcgcccggcagcggcagcggcagctctgataccgaggaaaatgtcaagcggagaacccacaacgtgctggaaagacagagacggaatgagctgaagcgctccttcttcgccctgcgggaccagatccccgagctggaaaacaacgagaaggcccctaaggtggtgatcctgaaaaaggctacagcctacatcctgagcgtgcaggccgagacccagaaactgatcagcgagatcgacctgctgagaaagcagaacgagcagctgaagcacaagctggaacaactcagaaacagctgcgcctaa

SEQ ID NO: 1407 - DNA, 1311 bp, synthetic construct
  source 1..1311: mol_type = other DNA; note = NLS-Keap1-(GS)4-OMOMYC nucleic acid
ccggcggcgaaacgcgtgaaactggatggcagcggcagcggcagccagccagatcccaggcctagcggggctggggcctgctgccgattcctgcccctgcagtcacagtgccctgagggggcaggggacgcggtgatgtacgcctccactgagtgcaaggcggaggtgacgccctcccagcatggcaaccgcaccttcagctacaccctggaggatcataccaagcaggcctttggcatcatgaacgagctgcggctcagccagcagctgtgtgacgtcacactgcaggtcaagtaccaggatgcaccggccgcccagttcatggcccacaaggtggtgctggcctcatccagccctgtcttcaaggccatgttcaccaacgggctgcgggagcagggcatggaggtggtgtccattgagggtatccaccccaaggtcatggagcgcctcattgaattcgcctacacggcctccatctccatgggcgagaagtgtgtcctccacgtcatgaacggtgctgtcatgtaccagatcgacagcgttgtccgtgcctgcagtgacttcctggtgcagcagctggaccccagcaatgccatcggcatcgccaacttcgctgagcagattggctgtgtggagttgcaccagcgtgcccgggagtacatctacatgcattttggggaggtggccaagcaagaggagttcttcaacctgtcccactgccaactggtgaccctcatcagccgggacgacctgaacgtgcgctgcgagtccgaggtcttccacgcctgcatcaactgggtcaagtacgactgcgaacagcgacggttctacgtccaggcgctgctgcgggccgtgcgctgccactcgttgacgccgaacttcctgcagatgcagctgcagaagtgcgagatcctgcagtccgactcccgctgcaaggactacctggtcaagatcttcgaggagctcaccctgcacaagcccacgcaggtgatgccctgccgggcgcccggcagcggcagcggcagcggcagctctgataccgaggaaaatgtcaagcggagaacccacaacgtgctggaaagacagagacggaatgagctgaagcgctccttcttcgccctgcgggaccagatccccgagctggaaaacaacgagaaggcccctaaggtggtgatcctgaaaaaggctacagcctacatcctgagcgtgcaggccgagacccagaaactgatcagcgagatcgacctgctgagaaagcagaacgagcagctgaagcacaagctggaacaactcagaaacagctgcgcctaa

SEQ ID NO: 1408 - DNA, 1317 bp, synthetic construct
  source 1..1317: mol_type = other DNA; note = NLS-Keap1-(GS)5-OMOMYC nucleic acid
ccggcggcgaaacgcgtgaaactggatggcagcggcagcggcagccagccagatcccaggcctagcggggctggggcctgctgccgattcctgcccctgcagtcacagtgccctgagggggcaggggacgcggtgatgtacgcctccactgagtgcaaggcggaggtgacgccctcccagcatggcaaccgcaccttcagctacaccctggaggatcataccaagcaggcctttggcatcatgaacgagctgcggctcagccagcagctgtgtgacgtcacactgcaggtcaagtaccaggatgcaccggccgcccagttcatggcccacaaggtggtgctggcctcatccagccctgtcttcaaggccatgttcaccaacgggctgcgggagcagggcatggaggtggtgtccattgagggtatccaccccaaggtcatggagcgcctcattgaattcgcctacacggcctccatctccatgggcgagaagtgtgtcctccacgtcatgaacggtgctgtcatgtaccagatcgacagcgttgtccgtgcctgcagtgacttcctggtgcagcagctggaccccagcaatgccatcggcatcgccaacttcgctgagcagattggctgtgtggagttgcaccagcgtgcccgggagtacatctacatgcattttggggaggtggccaagcaagaggagttcttcaacctgtcccactgccaactggtgaccctcatcagccgggacgacctgaacgtgcgctgcgagtccgaggtcttccacgcctgcatcaactgggtcaagtacgactgcgaacagcgacggttctacgtccaggcgctgctgcgggccgtgcgctgccactcgttgacgccgaacttcctgcagatgcagctgcagaagtgcgagatcctgcagtccgactcccgctgcaaggactacctggtcaagatcttcgaggagctcaccctgcacaagcccacgcaggtgatgccctgccgggcgcccggcagcggcagcggcagcggcagcggcagctctgataccgaggaaaatgtcaagcggagaacccacaacgtgctggaaagacagagacggaatgagctgaagcgctccttcttcgccctgcgggaccagatccccgagctggaaaacaacgagaaggcccctaaggtggtgatcctgaaaaaggctacagcctacatcctgagcgtgcaggccgagacccagaaactgatcagcgagatcgacctgctgagaaagcagaacgagcagctgaagcacaagctggaacaactcagaaacagctgcgcctaa

SEQ ID NO: 1409 - DNA, 1323 bp, synthetic construct
  source 1..1323: mol_type = other DNA; note = NLS-Keap1-(GS)6-OMOMYC nucleic acid
ccggcggcgaaacgcgtgaaactggatggcagcggcagcggcagccagccagatcccaggcctagcggggctggggcctgctgccgattcctgcccctgcagtcacagtgccctgagggggcaggggacgcggtgatgtacgcctccactgagtgcaaggcggaggtgacgccctcccagcatggcaaccgcaccttcagctacaccctggaggatcataccaagcaggcctttggcatcatgaacgagctgcggctcagccagcagctgtgtgacgtcacactgcaggtcaagtaccaggatgcaccggccgcccagttcatggcccacaaggtggtgctggcctcatccagccctgtcttcaaggccatgttcaccaacgggctgcgggagcagggcatggaggtggtgtccattgagggtatccaccccaaggtcatggagcgcctcattgaattcgcctacacggcctccatctccatgggcgagaagtgtgtcctccacgtcatgaacggtgctgtcatgtaccagatcgacagcgttgtccgtgcctgcagtgacttcctggtgcagcagctggaccccagcaatgccatcggcatcgccaacttcgctgagcagattggctgtgtggagttgcaccagcgtgcccgggagtacatctacatgcattttggggaggtggccaagcaagaggagttcttcaacctgtcccactgccaactggtgaccctcatcagccgggacgacctgaacgtgcgctgcgagtccgaggtcttccacgcctgcatcaactgggtcaagtacgactgcgaacagcgacggttctacgtccaggcgctgctgcgggccgtgcgctgccactcgttgacgccgaacttcctgcagatgcagctgcagaagtgcgagatcctgcagtccgactcccgctgcaaggactacctggtcaagatcttcgaggagctcaccctgcacaagcccacgcaggtgatgccctgccgggcgcccggcagcggcagcggcagcggcagcggcagcggcagctctgataccgaggaaaatgtcaagcggagaacccacaacgtgctggaaagacagagacggaatgagctgaagcgctccttcttcgccctgcgggaccagatccccgagctggaaaacaacgagaaggcccctaaggtggtgatcctgaaaaaggctacagcctacatcctgagcgtgcaggccgagacccagaaactgatcagcgagatcgacctgctgagaaagcagaacgagcagctgaagcacaagctggaacaactcagaaacagctgcgcctaa

SEQ ID NO: 1410 - DNA, 1323 bp, synthetic construct
  source 1..1323: mol_type = other DNA; note = HA-NLS-Keap1-(GS)1-OMOMYC nucleic acid
atgtacccatacgatgttccagattacgctccggcggcgaaacgcgtgaaactggatggcagcggcagcggcagccagccagatcccaggcctagcggggctggggcctgctgccgattcctgcccctgcagtcacagtgccctgagggggcaggggacgcggtgatgtacgcctccactgagtgcaaggcggaggtgacgccctcccagcatggcaaccgcaccttcagctacaccctggaggatcataccaagcaggcctttggcatcatgaacgagctgcggctcagccagcagctgtgtgacgtcacactgcaggtcaagtaccaggatgcaccggccgcccagttcatggcccacaaggtggtgctggcctcatccagccctgtcttcaaggccatgttcaccaacgggctgcgggagcagggcatggaggtggtgtccattgagggtatccaccccaaggtcatggagcgcctcattgaattcgcctacacggcctccatctccatgggcgagaagtgtgtcctccacgtcatgaacggtgctgtcatgtaccagatcgacagcgttgtccgtgcctgcagtgacttcctggtgcagcagctggaccccagcaatgccatcggcatcgccaacttcgctgagcagattggctgtgtggagttgcaccagcgtgcccgggagtacatctacatgcattttggggaggtggccaagcaagaggagttcttcaacctgtcccactgccaactggtgaccctcatcagccgggacgacctgaacgtgcgctgcgagtccgaggtcttccacgcctgcatcaactgggtcaagtacgactgcgaacagcgacggttctacgtccaggcgctgctgcgggccgtgcgctgccactcgttgacgccgaacttcctgcagatgcagctgcagaagtgcgagatcctgcagtccgactcccgctgcaaggactacctggtcaagatcttcgaggagctcaccctgcacaagcccacgcaggtgatgccctgccgggcgcccggcagctctgataccgaggaaaatgtcaagcggagaacccacaacgtgctggaaagacagagacggaatgagctgaagcgctccttcttcgccctgcgggaccagatccccgagctggaaaacaacgagaaggcccctaaggtggtgatcctgaaaaaggctacagcctacatcctgagcgtgcaggccgagacccagaaactgatcagcgagatcgacctgctgagaaagcagaacgagcagctgaagcacaagctggaacaactcagaaacagctgcgcctaa

SEQ ID NO: 1411 - DNA, 1329 bp, synthetic construct
  source 1..1329: mol_type = other DNA; note = HA-NLS-Keap1-(GS)2-OMOMYC nucleic acid
atgtacccatacgatgttccagattacgctccggcggcgaaacgcgtgaaactggatggcagcggcagcggcagccagccagatcccaggcctagcggggctggggcctgctgccgattcctgcccctgcagtcacagtgccctgagggggcaggggacgcggtgatgtacgcctccactgagtgcaaggcggaggtgacgccctcccagcatggcaaccgcaccttcagctacaccctggaggatcataccaagcaggcctttggcatcatgaacgagctgcggctcagccagcagctgtgtgacgtcacactgcaggtcaagtaccaggatgcaccggccgcccagttcatggcccacaaggtggtgctggcctcatccagccctgtcttcaaggccatgttcaccaacgggctgcgggagcagggcatggaggtggtgtccattgagggtatccaccccaaggtcatggagcgcctcattgaattcgcctacacggcctccatctccatgggcgagaagtgtgtcctccacgtcatgaacggtgctgtcatgtaccagatcgacagcgttgtccgtgcctgcagtgacttcctggtgcagcagctggaccccagcaatgccatcggcatcgccaacttcgctgagcagattggctgtgtggagttgcaccagcgtgcccgggagtacatctacatgcattttggggaggtggccaagcaagaggagttcttcaacctgtcccactgccaactggtgaccctcatcagccgggacgacctgaacgtgcgctgcgagtccgaggtcttccacgcctgcatcaactgggtcaagtacgactgcgaacagcgacggttctacgtccaggcgctgctgcgggccgtgcgctgccactcgttgacgccgaacttcctgcagatgcagctgcagaagtgcgagatcctgcagtccgactcccgctgcaaggactacctggtcaagatcttcgaggagctcaccctgcacaagcccacgcaggtgatgccctgccgggcgcccggcagcggcagctctgataccgaggaaaatgtcaagcggagaacccacaacgtgctggaaagacagagacggaatgagctgaagcgctccttcttcgccctgcgggaccagatccccgagctggaaaacaacgagaaggcccctaaggtggtgatcctgaaaaaggctacagcctacatcctgagcgtgcaggccgagacccagaaactgatcagcgagatcgacctgctgagaaagcagaacgagcagctgaagcacaagctggaacaactcagaaacagctgcgcctaa

SEQ ID NO: 1412 - DNA, 1335 bp, synthetic construct
  source 1..1335: mol_type = other DNA; note = HA-NLS-Keap1-(GS)3-OMOMYC nucleic acid
atgtacccatacgatgttccagattacgctccggcggcgaaacgcgtgaaactggatggcagcggcagcggcagccagccagatcccaggcctagcggggctggggcctgctgccgattcctgcccctgcagtcacagtgccctgagggggcaggggacgcggtgatgtacgcctccactgagtgcaaggcggaggtgacgccctcccagcatggcaaccgcaccttcagctacaccctggaggatcataccaagcaggcctttggcatcatgaacgagctgcggctcagccagcagctgtgtgacgtcacactgcaggtcaagtaccaggatgcaccggccgcccagttcatggcccacaaggtggtgctggcctcatccagccctgtcttcaaggccatgttcaccaacgggctgcgggagcagggcatggaggtggtgtccattgagggtatccaccccaaggtcatggagcgcctcattgaattcgcctacacggcctccatctccatgggcgagaagtgtgtcctccacgtcatgaacggtgctgtcatgtaccagatcgacagcgttgtccgtgcctgcagtgacttcctggtgcagcagctggaccccagcaatgccatcggcatcgccaacttcgctgagcagattggctgtgtggagttgcaccagcgtgcccgggagtacatctacatgcattttggggaggtggccaagcaagaggagttcttcaacctgtcccactgccaactggtgaccctcatcagccgggacgacctgaacgtgcgctgcgagtccgaggtcttccacgcctgcatcaactgggtcaagtacgactgcgaacagcgacggttctacgtccaggcgctgctgcgggccgtgcgctgccactcgttgacgccgaacttcctgcagatgcagctgcagaagtgcgagatcctgcagtccgactcccgctgcaaggactacctggtcaagatcttcgaggagctcaccctgcacaagcccacgcaggtgatgccctgccgggcgcccggcagcggcagcggcagctctgataccgaggaaaatgtcaagcggagaacccacaacgtgctggaaagacagagacggaatgagctgaagcgctccttcttcgccctgcgggaccagatccccgagctggaaaacaacgagaaggcccctaaggtggtgatcctgaaaaaggctacagcctacatcctgagcgtgcaggccgagacccagaaactgatcagcgagatcgacctgctgagaaagcagaacgagcagctgaagcacaagctggaacaactcagaaacagctgcgcctaa

SEQ ID NO: 1413 - DNA, 1341 bp, synthetic construct
  source 1..1341: mol_type = other DNA; note = HA-NLS-Keap1-(GS)4-OMOMYC nucleic acid
atgtacccatacgatgttccagattacgctccggcggcgaaacgcgtgaaactggatggcagcggcagcggcagccagccagatcccaggcctagcggggctggggcctgctgccgattcctgcccctgcagtcacagtgccctgagggggcaggggacgcggtgatgtacgcctccactgagtgcaaggcggaggtgacgccctcccagcatggcaaccgcaccttcagctacaccctggaggatcataccaagcaggcctttggcatcatgaacgagctgcggctcagccagcagctgtgtgacgtcacactgcaggtcaagtaccaggatgcaccggccgcccagttcatggcccacaaggtggtgctggcctcatccagccctgtcttcaaggccatgttcaccaacgggctgcgggagcagggcatggaggtggtgtccattgagggtatccaccccaaggtcatggagcgcctcattgaattcgcctacacggcctccatctccatgggcgagaagtgtgtcctccacgtcatgaacggtgctgtcatgtaccagatcgacagcgttgtccgtgcctgcagtgacttcctggtgcagcagctggaccccagcaatgccatcggcatcgccaacttcgctgagcagattggctgtgtggagttgcaccagcgtgcccgggagtacatctacatgcattttggggaggtggccaagcaagaggagttcttcaacctgtcccactgccaactggtgaccctcatcagccgggacgacctgaacgtgcgctgcgagtccgaggtcttccacgcctgcatcaactgggtcaagtacgactgcgaacagcgacggttctacgtccaggcgctgctgcgggccgtgcgctgccactcgttgacgccgaacttcctgcagatgcagctgcagaagtgcgagatcctgcagtccgactcccgctgcaaggactacctggtcaagatcttcgaggagctcaccctgcacaagcccacgcaggtgatgccctgccgggcgcccggcagcggcagcggcagcggcagctctgataccgaggaaaatgtcaagcggagaacccacaacgtgctggaaagacagagacggaatgagctgaagcgctccttcttcgccctgcgggaccagatccccgagctggaaaacaacgagaaggcccctaaggtggtgatcctgaaaaaggctacagcctacatcctgagcgtgcaggccgagacccagaaactgatcagcgagatcgacctgctgagaaagcagaacgagcagctgaagcacaagctggaacaactcagaaacagctgcgcctaa

SEQ ID NO: 1414 - DNA, 1347 bp, synthetic construct
  source 1..1347: mol_type = other DNA; note = HA-NLS-Keap1-(GS)5-OMOMYC nucleic acid
atgtacccatacgatgttccagattacgctccggcggcgaaacgcgtgaaactggatggcagcggcagcggcagccagccagatcccaggcctagcggggctggggcctgctgccgattcctgcccctgcagtcacagtgccctgagggggcaggggacgcggtgatgtacgcctccactgagtgcaaggcggaggtgacgccctcccagcatggcaaccgcaccttcagctacaccctggaggatcataccaagcaggcctttggcatcatgaacgagctgcggctcagccagcagctgtgtgacgtcacactgcaggtcaagtaccaggatgcaccggccgcccagttcatggcccacaaggtggtgctggcctcatccagccctgtcttcaaggccatgttcaccaacgggctgcgggagcagggcatggaggtggtgtccattgagggtatccaccccaaggtcatggagcgcctcattgaattcgcctacacggcctccatctccatgggcgagaagtgtgtcctccacgtcatgaacggtgctgtcatgtaccagatcgacagcgttgtccgtgcctgcagtgacttcctggtgcagcagctggaccccagcaatgccatcggcatcgccaacttcgctgagcagattggctgtgtggagttgcaccagcgtgcccgggagtacatctacatgcattttggggaggtggccaagcaagaggagttcttcaacctgtcccactgccaactggtgaccctcatcagccgggacgacctgaacgtgcgctgcgagtccgaggtcttccacgcctgcatcaactgggtcaagtacgactgcgaacagcgacggttctacgtccaggcgctgctgcgggccgtgcgctgccactcgttgacgccgaacttcctgcagatgcagctgcagaagtgcgagatcctgcagtccgactcccgctgcaaggactacctggtcaagatcttcgaggagctcaccctgcacaagcccacgcaggtgatgccctgccgggcgcccggcagcggcagcggcagcggcagcggcagctctgataccgaggaaaatgtcaagcggagaacccacaacgtgctggaaagacagagacggaatgagctgaagcgctccttcttcgccctgcgggaccagatccccgagctggaaaacaacgagaaggcccctaaggtggtgatcctgaaaaaggctacagcctacatcctgagcgtgcaggccgagacccagaaactgatcagcgagatcgacctgctgagaaagcagaacgagcagctgaagcacaagctggaacaactcagaaacagctgcgcctaa

SEQ ID NO: 1415 - DNA, 1353 bp, synthetic construct
  source 1..1353: mol_type = other DNA; note = HA-NLS-Keap1-(GS)6-OMOMYC nucleic acid
atgtacccatacgatgttccagattacgctccggcggcgaaacgcgtgaaactggatggcagcggcagcggcagccagccagatcccaggcctagcggggctggggcctgctgccgattcctgcccctgcagtcacagtgccctgagggggcaggggacgcggtgatgtacgcctccactgagtgcaaggcggaggtgacgccctcccagcatggcaaccgcaccttcagctacaccctggaggatcataccaagcaggcctttggcatcatgaacgagctgcggctcagccagcagctgtgtgacgtcacactgcaggtcaagtaccaggatgcaccggccgcccagttcatggcccacaaggtggtgctggcctcatccagccctgtcttcaaggccatgttcaccaacgggctgcgggagcagggcatggaggtggtgtccattgagggtatccaccccaaggtcatggagcgcctcattgaattcgcctacacggcctccatctccatgggcgagaagtgtgtcctccacgtcatgaacggtgctgtcatgtaccagatcgacagcgttgtccgtgcctgcagtgacttcctggtgcagcagctggaccccagcaatgccatcggcatcgccaacttcgctgagcagattggctgtgtggagttgcaccagcgtgcccgggagtacatctacatgcattttggggaggtggccaagcaagaggagttcttcaacctgtcccactgccaactggtgaccctcatcagccgggacgacctgaacgtgcgctgcgagtccgaggtcttccacgcctgcatcaactgggtcaagtacgactgcgaacagcgacggttctacgtccaggcgctgctgcgggccgtgcgctgccactcgttgacgccgaacttcctgcagatgcagctgcagaagtgcgagatcctgcagtccgactcccgctgcaaggactacctggtcaagatcttcgaggagctcaccctgcacaagcccacgcaggtgatgccctgccgggcgcccggcagcggcagcggcagcggcagcggcagcggcagctctgataccgaggaaaatgtcaagcggagaacccacaacgtgctggaaagacagagacggaatgagctgaagcgctccttcttcgccctgcgggaccagatccccgagctggaaaacaacgagaaggcccctaaggtggtgatcctgaaaaaggctacagcctacatcctgagcgtgcaggccgagacccagaaactgatcagcgagatcgacctgctgagaaagcagaacgagcagctgaagcacaagctggaacaactcagaaacagctgcgcctaa

SEQ ID NO: 1416 - DNA, 711 bp, synthetic construct
  source 1..711: mol_type = other DNA; note = NLS-RNF125-(GS)1-OMOMYC nucleic acid
ccggcggcgaaacgcgtgaaactggatggcagcggcagcggcagcggctccgtgctgagcaccgacagcggcaaatcggcgcccgcctctgccaccgcgcgggccctggagcgcaggagggacccggagttgcccgtcacgtccttcgactgcgccgtgtgccttgaggtgttacaccagcctgtccggacccgctgcggccacgtattctgccgttcctgtattgctaccagtctgaagaacaacaagtggacctgtccttattgccgggcatatcttccttcagaaggagttccagcaactgatgtagccaaaagaatgaaatcagagtataagaactgcgctgagtgtgacaccctggtttgcctcagtgaaatgagggcacatattcggacttgtcagaagtacatagataagtatggaccaggcagctctgataccgaggaaaatgtcaagcggagaacccacaacgtgctggaaagacagagacggaatgagctgaagcgctccttcttcgccctgcgggaccagatccccgagctggaaaacaacgagaaggcccctaaggtggtgatcctgaaaaaggctacagcctacatcctgagcgtgcaggccgagacccagaaactgatcagcgagatcgacctgctgagaaagcagaacgagcagctgaagcacaagctggaacaactcagaaacagctgcgcctaa

SEQ ID NO: 1417 - DNA, 717 bp, synthetic construct
  source 1..717: mol_type = other DNA; note = NLS-RNF125-(GS)2-OMOMYC nucleic acid
ccggcggcgaaacgcgtgaaactggatggcagcggcagcggcagcggctccgtgctgagcaccgacagcggcaaatcggcgcccgcctctgccaccgcgcgggccctggagcgcaggagggacccggagttgcccgtcacgtccttcgactgcgccgtgtgccttgaggtgttacaccagcctgtccggacccgctgcggccacgtattctgccgttcctgtattgctaccagtctgaagaacaacaagtggacctgtccttattgccgggcatatcttccttcagaaggagttccagcaactgatgtagccaaaagaatgaaatcagagtataagaactgcgctgagtgtgacaccctggtttgcctcagtgaaatgagggcacatattcggacttgtcagaagtacatagataagtatggaccaggcagcggcagctctgataccgaggaaaatgtcaagcggagaacccacaacgtgctggaaagacagagacggaatgagctgaagcgctccttcttcgccctgcgggaccagatccccgagctggaaaacaacgagaaggcccctaaggtggtgatcctgaaaaaggctacagcctacatcctgagcgtgcaggccgagacccagaaactgatcagcgagatcgacctgctgagaaagcagaacgagcagctgaagcacaagctggaacaactcagaaacagctgcgcctaa

SEQ ID NO: 1418 - DNA, 723 bp, synthetic construct
  source 1..723: mol_type = other DNA; note = NLS-RNF125-(GS)3-OMOMYC nucleic acid
ccggcggcgaaacgcgtgaaactggatggcagcggcagcggcagcggctccgtgctgagcaccgacagcggcaaatcggcgcccgcctctgccaccgcgcgggccctggagcgcaggagggacccggagttgcccgtcacgtccttcgactgcgccgtgtgccttgaggtgttacaccagcctgtccggacccgctgcggccacgtattctgccgttcctgtattgctaccagtctgaagaacaacaagtggacctgtccttattgccgggcatatcttccttcagaaggagttccagcaactgatgtagccaaaagaatgaaatcagagtataagaactgcgctgagtgtgacaccctggtttgcctcagtgaaatgagggcacatattcggacttgtcagaagtacatagataagtatggaccaggcagcggcagcggcagctctgataccgaggaaaatgtcaagcggagaacccacaacgtgctggaaagacagagacggaatgagctgaagcgctccttcttcgccctgcgggaccagatccccgagctggaaaacaacgagaaggcccctaaggtggtgatcctgaaaaaggctacagcctacatcctgagcgtgcaggccgagacccagaaactgatcagcgagatcgacctgctgagaaagcagaacgagcagctgaagcacaagctggaacaactcagaaacagctgcgcctaa

SEQ ID NO: 1419 - DNA, 729 bp, synthetic construct
  source 1..729: mol_type = other DNA; note = NLS-RNF125-(GS)4-OMOMYC nucleic acid
ccggcggcgaaacgcgtgaaactggatggcagcggcagcggcagcggctccgtgctgagcaccgacagcggcaaatcggcgcccgcctctgccaccgcgcgggccctggagcgcaggagggacccggagttgcccgtcacgtccttcgactgcgccgtgtgccttgaggtgttacaccagcctgtccggacccgctgcggccacgtattctgccgttcctgtattgctaccagtctgaagaacaacaagtggacctgtccttattgccgggcatatcttccttcagaaggagttccagcaactgatgtagccaaaagaatgaaatcagagtataagaactgcgctgagtgtgacaccctggtttgcctcagtgaaatgagggcacatattcggacttgtcagaagtacatagataagtatggaccaggcagcggcagcggcagcggcagctctgataccgaggaaaatgtcaagcggagaacccacaacgtgctggaaagacagagacggaatgagctgaagcgctccttcttcgccctgcgggaccagatccccgagctggaaaacaacgagaaggcccctaaggtggtgatcctgaaaaaggctacagcctacatcctgagcgtgcaggccgagacccagaaactgatcagcgagatcgacctgctgagaaagcagaacgagcagctgaagcacaagctggaacaactcagaaacagctgcgcctaa

SEQ ID NO: 1420 - DNA, 735 bp, synthetic construct
  source 1..735: mol_type = other DNA; note = NLS-RNF125-(GS)5-OMOMYC nucleic acid
ccggcggcgaaacgcgtgaaactggatggcagcggcagcggcagcggctccgtgctgagcaccgacagcggcaaatcggcgcccgcctctgccaccgcgcgggccctggagcgcaggagggacccggagttgcccgtcacgtccttcgactgcgccgtgtgccttgaggtgttacaccagcctgtccggacccgctgcggccacgtattctgccgttcctgtattgctaccagtctgaagaacaacaagtggacctgtccttattgccgggcatatcttccttcagaaggagttccagcaactgatgtagccaaaagaatgaaatcagagtataagaactgcgctgagtgtgacaccctggtttgcctcagtgaaatgagggcacatattcggacttgtcagaagtacatagataagtatggaccaggcagcggcagcggcagcggcagcggcagctctgataccgaggaaaatgtcaagcggagaacccacaacgtgctggaaagacagagacggaatgagctgaagcgctccttcttcgccctgcgggaccagatccccgagctggaaaacaacgagaaggcccctaaggtggtgatcctgaaaaaggctacagcctacatcctgagcgtgcaggccgagacccagaaactgatcagcgagatcgacctgctgagaaagcagaacgagcagctgaagcacaagctggaacaactcagaaacagctgcgcctaa

SEQ ID NO: 1421 - DNA, 741 bp, synthetic construct
  source 1..741: mol_type = other DNA; note = NLS-RNF125-(GS)6-OMOMYC nucleic acid
ccggcggcgaaacgcgtgaaactggatggcagcggcagcggcagcggctccgtgctgagcaccgacagcggcaaatcggcgcccgcctctgccaccgcgcgggccctggagcgcaggagggacccggagttgcccgtcacgtccttcgactgcgccgtgtgccttgaggtgttacaccagcctgtccggacccgctgcggccacgtattctgccgttcctgtattgctaccagtctgaagaacaacaagtggacctgtccttattgccgggcatatcttccttcagaaggagttccagcaactgatgtagccaaaagaatgaaatcagagtataagaactgcgctgagtgtgacaccctggtttgcctcagtgaaatgagggcacatattcggacttgtcagaagtacatagataagtatggaccaggcagcggcagcggcagcggcagcggcagcggcagctctgataccgaggaaaatgtcaagcggagaacccacaacgtgctggaaagacagagacggaatgagctgaagcgctccttcttcgccctgcgggaccagatccccgagctggaaaacaacgagaaggcccctaaggtggtgatcctgaaaaaggctacagcctacatcctgagcgtgcaggccgagacccagaaactgatcagcgagatcgacctgctgagaaagcagaacgagcagctgaagcacaagctggaacaactcagaaacagctgcgcctaa

SEQ ID NO: 1422 - DNA, 741 bp, synthetic construct
  source 1..741: mol_type = other DNA; note = HA-NLS-RNF125-(GS)1-OMOMYC nucleic acid
atgtacccatacgatgttccagattacgctccggcggcgaaacgcgtgaaactggatggcagcggcagcggcagcggctccgtgctgagcaccgacagcggcaaatcggcgcccgcctctgccaccgcgcgggccctggagcgcaggagggacccggagttgcccgtcacgtccttcgactgcgccgtgtgccttgaggtgttacaccagcctgtccggacccgctgcggccacgtattctgccgttcctgtattgctaccagtctgaagaacaacaagtggacctgtccttattgccgggcatatcttccttcagaaggagttccagcaactgatgtagccaaaagaatgaaatcagagtataagaactgcgctgagtgtgacaccctggtttgcctcagtgaaatgagggcacatattcggacttgtcagaagtacatagataagtatggaccaggcagctctgataccgaggaaaatgtcaagcggagaacccacaacgtgctggaaagacagagacggaatgagctgaagcgctccttcttcgccctgcgggaccagatccccgagctggaaaacaacgagaaggcccctaaggtggtgatcctgaaaaaggctacagcctacatcctgagcgtgcaggccgagacccagaaactgatcagcgagatcgacctgctgagaaagcagaacgagcagctgaagcacaagctggaacaactcagaaacagctgcgcctaa

SEQ ID NO: 1423 - DNA, 747 bp, synthetic construct
  source 1..747: mol_type = other DNA; note = HA-NLS-RNF125-(GS)2-OMOMYC nucleic acid
atgtacccatacgatgttccagattacgctccggcggcgaaacgcgtgaaactggatggcagcggcagcggcagcggctccgtgctgagcaccgacagcggcaaatcggcgcccgcctctgccaccgcgcgggccctggagcgcaggagggacccggagttgcccgtcacgtccttcgactgcgccgtgtgccttgaggtgttacaccagcctgtccggacccgctgcggccacgtattctgccgttcctgtattgctaccagtctgaagaacaacaagtggacctgtccttattgccgggcatatcttccttcagaaggagttccagcaactgatgtagccaaaagaatgaaatcagagtataagaactgcgctgagtgtgacaccctggtttgcctcagtgaaatgagggcacatattcggacttgtcagaagtacatagataagtatggaccaggcagcggcagctctgataccgaggaaaatgtcaagcggagaacccacaacgtgctggaaagacagagacggaatgagctgaagcgctccttcttcgccctgcgggaccagatccccgagctggaaaacaacgagaaggcccctaaggtggtgatcctgaaaaaggctacagcctacatcctgagcgtgcaggccgagacccagaaactgatcagcgagatcgacctgctgagaaagcagaacgagcagctgaagcacaagctggaacaactcagaaacagctgcgcctaa

SEQ ID NO: 1424 - DNA, 753 bp, synthetic construct
  source 1..753: mol_type = other DNA; note = HA-NLS-RNF125-(GS)3-OMOMYC nucleic acid
atgtacccatacgatgttccagattacgctccggcggcgaaacgcgtgaaactggatggcagcggcagcggcagcggctccgtgctgagcaccgacagcggcaaatcggcgcccgcctctgccaccgcgcgggccctggagcgcaggagggacccggagttgcccgtcacgtccttcgactgcgccgtgtgccttgaggtgttacaccagcctgtccggacccgctgcggccacgtattctgccgttcctgtattgctaccagtctgaagaacaacaagtggacctgtccttattgccgggcatatcttccttcagaaggagttccagcaactgatgtagccaaaagaatgaaatcagagtataagaactgcgctgagtgtgacaccctggtttgcctcagtgaaatgagggcacatattcggacttgtcagaagtacatagataagtatggaccaggcagcggcagcggcagctctgataccgaggaaaatgtcaagcggagaacccacaacgtgctggaaagacagagacggaatgagctgaagcgctccttcttcgccctgcgggaccagatccccgagctggaaaacaacgagaaggcccctaaggtggtgatcctgaaaaaggctacagcctacatcctgagcgtgcaggccgagacccagaaactgatcagcgagatcgacctgctgagaaagcagaacgagcagctgaagcacaagctggaacaactcagaaacagctgcgcctaa

SEQ ID NO: 1425 - DNA, 759 bp, synthetic construct
  source 1..759: mol_type = other DNA; note = HA-NLS-RNF125-(GS)4-OMOMYC nucleic acid
atgtacccatacgatgttccagattacgctccggcggcgaaacgcgtgaaactggatggcagcggcagcggcagcggctccgtgctgagcaccgacagcggcaaatcggcgcccgcctctgccaccgcgcgggccctggagcgcaggagggacccggagttgcccgtcacgtccttcgactgcgccgtgtgccttgaggtgttacaccagcctgtccggacccgctgcggccacgtattctgccgttcctgtattgctaccagtctgaagaacaacaagtggacctgtccttattgccgggcatatcttccttcagaaggagttccagcaactgatgtagccaaaagaatgaaatcagagtataagaactgcgctgagtgtgacaccctggtttgcctcagtgaaatgagggcacatattcggacttgtcagaagtacatagataagtatggaccaggcagcggcagcggcagcggcagctctgataccgaggaaaatgtcaagcggagaacccacaacgtgctggaaagacagagacggaatgagctgaagcgctccttcttcgccctgcgggaccagatccccgagctggaaaacaacgagaaggcccctaaggtggtgatcctgaaaaaggctacagcctacatcctgagcgtgcaggccgagacccagaaactgatcagcgagatcgacctgctgagaaagcagaacgagcagctgaagcacaagctggaacaactcagaaacagctgcgcctaa

SEQ ID NO: 1426 - DNA, 765 bp, synthetic construct
  source 1..765: mol_type = other DNA; note = HA-NLS-RNF125-(GS)5-OMOMYC nucleic acid
atgtacccatacgatgttccagattacgctccggcggcgaaacgcgtgaaactggatggcagcggcagcggcagcggctccgtgctgagcaccgacagcggcaaatcggcgcccgcctctgccaccgcgcgggccctggagcgcaggagggacccggagttgcccgtcacgtccttcgactgcgccgtgtgccttgaggtgttacaccagcctgtccggacccgctgcggccacgtattctgccgttcctgtattgctaccagtctgaagaacaacaagtggacctgtccttattgccgggcatatcttccttcagaaggagttccagcaactgatgtagccaaaagaatgaaatcagagtataagaactgcgctgagtgtgacaccctggtttgcctcagtgaaatgagggcacatattcggacttgtcagaagtacatagataagtatggaccaggcagcggcagcggcagcggcagcggcagctctgataccgaggaaaatgtcaagcggagaacccacaacgtgctggaaagacagagacggaatgagctgaagcgctccttcttcgccctgcgggaccagatccccgagctggaaaacaacgagaaggcccctaaggtggtgatcctgaaaaaggctacagcctacatcctgagcgtgcaggccgagacccagaaactgatcagcgagatcgacctgctgagaaagcagaacgagcagctgaagcacaagctggaacaactcagaaacagctgcgcctaa

SEQ ID NO: 1427 - DNA, 771 bp, synthetic construct
  source 1..771: mol_type = other DNA; note = HA-NLS-RNF125-(GS)6-OMOMYC nucleic acid
atgtacccatacgatgttccagattacgctccggcggcgaaacgcgtgaaactggatggcagcggcagcggcagcggctccgtgctgagcaccgacagcggcaaatcggcgcccgcctctgccaccgcgcgggccctggagcgcaggagggacccggagttgcccgtcacgtccttcgactgcgccgtgtgccttgaggtgttacaccagcctgtccggacccgctgcggccacgtattctgccgttcctgtattgctaccagtctgaagaacaacaagtggacctgtccttattgccgggcatatcttccttcagaaggagttccagcaactgatgtagccaaaagaatgaaatcagagtataagaactgcgctgagtgtgacaccctggtttgcctcagtgaaatgagggcacatattcggacttgtcagaagtacatagataagtatggaccaggcagcggcagcggcagcggcagcggcagcggcagctctgataccgaggaaaatgtcaagcggagaacccacaacgtgctggaaagacagagacggaatgagctgaagcgctccttcttcgccctgcgggaccagatccccgagctggaaaacaacgagaaggcccctaaggtggtgatcctgaaaaaggctacagcctacatcctgagcgtgcaggccgagacccagaaactgatcagcgagatcgacctgctgagaaagcagaacgagcagctgaagcacaagctggaacaactcagaaacagctgcgcctaa

SEQ ID NO: 1428 - DNA, 1008 bp, synthetic construct
  source 1..1008: mol_type = other DNA; note = OMOMYC-(GS)1-SPOP-NLS nucleic acid
atgtctgataccgaggaaaatgtcaagcggagaacccacaacgtgctggaaagacagagacggaatgagctgaagcgctccttcttcgccctgcgggaccagatccccgagctggaaaacaacgagaaggcccctaaggtggtgatcctgaaaaaggctacagcctacatcctgagcgtgcaggccgagacccagaaactgatcagcgagatcgacctgctgagaaagcagaacgagcagctgaagcacaagctggaacaactcagaaacagctgcgccggcagcaacgggcttctccctgatgacaagcttaccctcttctgcgaggtgagtgttgtgcaagattctgtcaacatttctggccagaataccatgaacatggtaaaggttcctgagtgccggctggcagatgagttaggaggactgtgggagaattcccggttcacagactgctgcttgtgtgttgccggccaggaattccaggctcacaaggctatcttagcagctcgttctccggtttttagtgccatgtttgaacatgaaatggaggagagcaaaaagaatcgagttgaaatcaatgatgtggagcctgaagtttttaaggaaatgatgtgcttcatttacacggggaaggctccaaacctcgacaaaatggctgatgatttgctggcagctgctgacaagtatgccctggagcgcttaaaggtcatgtgtgaggatgccctctgcagtaacctgtccgtggagaacgctgcagaaattctcatcctggccgacctccacagtgcagatcagttgaaaactcaggcagtggatttcatcaactatcatgcttcggatgtcttggagacctctgggtggaagtcaatggtggtgtcacatccccacttggtggctgaggcataccgctctctggcttcagcacagtgcccttttctgggacccccacgcaaacgcctgaagcaatccggcagcggcagcccggcggcgaaacgcgtgaaactggat

SEQ ID NO: 1429 - DNA, 1014 bp, synthetic construct
  source 1..1014: mol_type = other DNA; note = OMOMYC-(GS)2-SPOP-NLS nucleic acid
atgtctgataccgaggaaaatgtcaagcggagaacccacaacgtgctggaaagacagagacggaatgagctgaagcgctccttcttcgccctgcgggaccagatccccgagctggaaaacaacgagaaggcccctaaggtggtgatcctgaaaaaggctacagcctacatcctgagcgtgcaggccgagacccagaaactgatcagcgagatcgacctgctgagaaagcagaacgagcagctgaagcacaagctggaacaactcagaaacagctgcgccggcagcggcagcaacgggcttctccctgatgacaagcttaccctcttctgcgaggtgagtgttgtgcaagattctgtcaacatttctggccagaataccatgaacatggtaaaggttcctgagtgccggctggcagatgagttaggaggactgtgggagaattcccggttcacagactgctgcttgtgtgttgccggccaggaattccaggctcacaaggctatcttagcagctcgttctccggtttttagtgccatgtttgaacatgaaatggaggagagcaaaaagaatcgagttgaaatcaatgatgtggagcctgaagtttttaaggaaatgatgtgcttcatttacacggggaaggctccaaacctcgacaaaatggctgatgatttgctggcagctgctgacaagtatgccctggagcgcttaaaggtcatgtgtgaggatgccctctgcagtaacctgtccgtggagaacgctgcagaaattctcatcctggccgacctccacagtgcagatcagttgaaaactcaggcagtggatttcatcaactatcatgcttcggatgtcttggagacctctgggtggaagtcaatggtggtgtcacatccccacttggtggctgaggcataccgctctctggcttcagcacagtgcccttttctgggacccccacgcaaacgcctgaagcaatccggcagcggcagcccggcggcgaaacgcgtgaaactggat

SEQ ID NO: 1430 - DNA, 1020 bp, synthetic construct
  source 1..1020: mol_type = other DNA; note = OMOMYC-(GS)3-SPOP-NLS nucleic acid
atgtctgataccgaggaaaatgtcaagcggagaacccacaacgtgctggaaagacagagacggaatgagctgaagcgctccttcttcgccctgcgggaccagatccccgagctggaaaacaacgagaaggcccctaaggtggtgatcctgaaaaaggctacagcctacatcctgagcgtgcaggccgagacccagaaactgatcagcgagatcgacctgctgagaaagcagaacgagcagctgaagcacaagctggaacaactcagaaacagctgcgccggcagcggcagcggcagcaacgggcttctccctgatgacaagcttaccctcttctgcgaggtgagtgttgtgcaagattctgtcaacatttctggccagaataccatgaacatggtaaaggttcctgagtgccggctggcagatgagttaggaggactgtgggagaattcccggttcacagactgctgcttgtgtgttgccggccaggaattccaggctcacaaggctatcttagcagctcgttctccggtttttagtgccatgtttgaacatgaaatggaggagagcaaaaagaatcgagttgaaatcaatgatgtggagcctgaagtttttaaggaaatgatgtgcttcatttacacggggaaggctccaaacctcgacaaaatggctgatgatttgctggcagctgctgacaagtatgccctggagcgcttaaaggtcatgtgtgaggatgccctctgcagtaacctgtccgtggagaacgctgcagaaattctcatcctggccgacctccacagtgcagatcagttgaaaactcaggcagtggatttcatcaactatcatgcttcggatgtcttggagacctctgggtggaagtcaatggtggtgtcacatccccacttggtggctgaggcataccgctctctggcttcagcacagtgcccttttctgggacccccacgcaaacgcctgaagcaatccggcagcggcagcccggcggcgaaacgcgtgaaactggat

SEQ ID NO: 1431 - DNA, 1026 bp, synthetic construct
  source 1..1026: mol_type = other DNA; note = OMOMYC-(GS)4-SPOP-NLS nucleic acid
atgtctgataccgaggaaaatgtcaagcggagaacccacaacgtgctggaaagacagagacggaatgagctgaagcgctccttcttcgccctgcgggaccagatccccgagctggaaaacaacgagaaggcccctaaggtggtgatcctgaaaaaggctacagcctacatcctgagcgtgcaggccgagacccagaaactgatcagcgagatcgacctgctgagaaagcagaacgagcagctgaagcacaagctggaacaactcagaaacagctgcgccggcagcggcagcggcagcggcagcaacgggcttctccctgatgacaagcttaccctcttctgcgaggtgagtgttgtgcaagattctgtcaacatttctggccagaataccatgaacatggtaaaggttcctgagtgccggctggcagatgagttaggaggactgtgggagaattcccggttcacagactgctgcttgtgtgttgccggccaggaattccaggctcacaaggctatcttagcagctcgttctccggtttttagtgccatgtttgaacatgaaatggaggagagcaaaaagaatcgagttgaaatcaatgatgtggagcctgaagtttttaaggaaatgatgtgcttcatttacacggggaaggctccaaacctcgacaaaatggctgatgatttgctggcagctgctgacaagtatgccctggagcgcttaaaggtcatgtgtgaggatgccctctgcagtaacctgtccgtggagaacgctgcagaaattctcatcctggccgacctccacagtgcagatcagttgaaaactcaggcagtggatttcatcaactatcatgcttcggatgtcttggagacctctgggtggaagtcaatggtggtgtcacatccccacttggtggctgaggcataccgctctctggcttcagcacagtgcccttttctgggacccccacgcaaacgcctgaagcaatccggcagcggcagcccggcggcgaaacgcgtgaaactggat

SEQ ID NO: 1432 - DNA, 1032 bp, synthetic construct
  source 1..1032: mol_type = other DNA; note = OMOMYC-(GS)5-SPOP-NLS nucleic acid
atgtctgataccgaggaaaatgtcaagcggagaacccacaacgtgctggaaagacagagacggaatgagctgaagcgctccttcttcgccctgcgggaccagatccccgagctggaaaacaacgagaaggcccctaaggtggtgatcctgaaaaaggctacagcctacatcctgagcgtgcaggccgagacccagaaactgatcagcgagatcgacctgctgagaaagcagaacgagcagctgaagcacaagctggaacaactcagaaacagctgcgccggcagcggcagcggcagcggcagcggcagcaacgggcttctccctgatgacaagcttaccctcttctgcgaggtgagtgttgtgcaagattctgtcaacatttctggccagaataccatgaacatggtaaaggttcctgagtgccggctggcagatgagttaggaggactgtgggagaattcccggttcacagactgctgcttgtgtgttgccggccaggaattccaggctcacaaggctatcttagcagctcgttctccggtttttagtgccatgtttgaacatgaaatggaggagagcaaaaagaatcgagttgaaatcaatgatgtggagcctgaagtttttaaggaaatgatgtgcttcatttacacggggaaggctccaaacctcgacaaaatggctgatgatttgctggcagctgctgacaagtatgccctggagcgcttaaaggtcatgtgtgaggatgccctctgcagtaacctgtccgtggagaacgctgcagaaattctcatcctggccgacctccacagtgcagatcagttgaaaactcaggcagtggatttcatcaactatcatgcttcggatgtcttggagacctctgggtggaagtcaatggtggtgtcacatccccacttggtggctgaggcataccgctctctggcttcagcacagtgcccttttctgggacccccacgcaaacgcctgaagcaatccggcagcggcagcccggcggcgaaacgcgtgaaactggat

SEQ ID NO: 1433 - DNA, 1038 bp, synthetic construct
  source 1..1038: mol_type = other DNA; note = OMOMYC-(GS)6-SPOP-NLS nucleic acid
atgtctgataccgaggaaaatgtcaagcggagaacccacaacgtgctggaaagacagagacggaatgagctgaagcgctccttcttcgccctgcgggaccagatccccgagctggaaaacaacgagaaggcccctaaggtggtgatcctgaaaaaggctacagcctacatcctgagcgtgcaggccgagacccagaaactgatcagcgagatcgacctgctgagaaagcagaacgagcagctgaagcacaagctggaacaactcagaaacagctgcgccggcagcggcagcggcagcggcagcggcagcggcagcaacgggcttctccctgatgacaagcttaccctcttctgcgaggtgagtgttgtgcaagattctgtcaacatttctggccagaataccatgaacatggtaaaggttcctgagtgccggctggcagatgagttaggaggactgtgggagaattcccggttcacagactgctgcttgtgtgttgccggccaggaattccaggctcacaaggctatcttagcagctcgttctccggtttttagtgccatgtttgaacatgaaatggaggagagcaaaaagaatcgagttgaaatcaatgatgtggagcctgaagtttttaaggaaatgatgtgcttcatttacacggggaaggctccaaacctcgacaaaatggctgatgatttgctggcagctgctgacaagtatgccctggagcgcttaaaggtcatgtgtgaggatgccctctgcagtaacctgtccgtggagaacgctgcagaaattctcatcctggccgacctccacagtgcagatcagttgaaaactcaggcagtggatttcatcaactatcatgcttcggatgtcttggagacctctgggtggaagtcaatggtggtgtcacatccccacttggtggctgaggcataccgctctctggcttcagcacagtgcccttttctgggacccccacgcaaacgcctgaagcaatccggcagcggcagcccggcggcgaaacgcgtgaaactggat

SEQ ID NO: 1434 - DNA, 1038 bp, synthetic construct
  source 1..1038: mol_type = other DNA; note = OMOMYC-(GS)1-SPOP-NLS-HA nucleic acid
atgtctgataccgaggaaaatgtcaagcggagaacccacaacgtgctggaaagacagagacggaatgagctgaagcgctccttcttcgccctgcgggaccagatccccgagctggaaaacaacgagaaggcccctaaggtggtgatcctgaaaaaggctacagcctacatcctgagcgtgcaggccgagacccagaaactgatcagcgagatcgacctgctgagaaagcagaacgagcagctgaagcacaagctggaacaactcagaaacagctgcgccggcagcaacgggcttctccctgatgacaagcttaccctcttctgcgaggtgagtgttgtgcaagattctgtcaacatttctggccagaataccatgaacatggtaaaggttcctgagtgccggctggcagatgagttaggaggactgtgggagaattcccggttcacagactgctgcttgtgtgttgccggccaggaattccaggctcacaaggctatcttagcagctcgttctccggtttttagtgccatgtttgaacatgaaatggaggagagcaaaaagaatcgagttgaaatcaatgatgtggagcctgaagtttttaaggaaatgatgtgcttcatttacacggggaaggctccaaacctcgacaaaatggctgatgatttgctggcagctgctgacaagtatgccctggagcgcttaaaggtcatgtgtgaggatgccctctgcagtaacctgtccgtggagaacgctgcagaaattctcatcctggccgacctccacagtgcagatcagttgaaaactcaggcagtggatttcatcaactatcatgcttcggatgtcttggagacctctgggtggaagtcaatggtggtgtcacatccccacttggtggctgaggcataccgctctctggcttcagcacagtgcccttttctgggacccccacgcaaacgcctgaagcaatccggcagcggcagcccggcggcgaaacgcgtgaaactggattacccatacgatgttccagattacgcttaa

SEQ ID NO: 1435 - DNA, 1044 bp, synthetic construct
  source 1..1044: mol_type = other DNA; note = OMOMYC-(GS)2-SPOP-NLS-HA nucleic acid
atgtctgataccgaggaaaatgtcaagcggagaacccacaacgtgctggaaagacagagacggaatgagctgaagcgctccttcttcgccctgcgggaccagatccccgagctggaaaacaacgagaaggcccctaaggtggtgatcctgaaaaaggctacagcctacatcctgagcgtgcaggccgagacccagaaactgatcagcgagatcgacctgctgagaaagcagaacgagcagctgaagcacaagctggaacaactcagaaacagctgcgccggcagcggcagcaacgggcttctccctgatgacaagcttaccctcttctgcgaggtgagtgttgtgcaagattctgtcaacatttctggccagaataccatgaacatggtaaaggttcctgagtgccggctggcagatgagttaggaggactgtgggagaattcccggttcacagactgctgcttgtgtgttgccggccaggaattccaggctcacaaggctatcttagcagctcgttctccggtttttagtgccatgtttgaacatgaaatggaggagagcaaaaagaatcgagttgaaatcaatgatgtggagcctgaagtttttaaggaaatgatgtgcttcatttacacggggaaggctccaaacctcgacaaaatggctgatgatttgctggcagctgctgacaagtatgccctggagcgcttaaaggtcatgtgtgaggatgccctctgcagtaacctgtccgtggagaacgctgcagaaattctcatcctggccgacctccacagtgcagatcagttgaaaactcaggcagtggatttcatcaactatcatgcttcggatgtcttggagacctctgggtggaagtcaatggtggtgtcacatccccacttggtggctgaggcataccgctctctggcttcagcacagtgcccttttctgggacccccacgcaaacgcctgaagcaatccggcagcggcagcccggcggcgaaacgcgtgaaactggattacccatacgatgttccagattacgcttaa

SEQ ID NO: 1436 - DNA, 1050 bp, synthetic construct
  source 1..1050: mol_type = other DNA; note = OMOMYC-(GS)3-SPOP-NLS-HA nucleic acid
atgtctgataccgaggaaaatgtcaagcggagaacccacaacgtgctggaaagacagagacggaatgagctgaagcgctccttcttcgccctgcgggaccagatccccgagctggaaaacaacgagaaggcccctaaggtggtgatcctgaaaaaggctacagcctacatcctgagcgtgcaggccgagacccagaaactgatcagcgagatcgacctgctgagaaagcagaacgagcagctgaagcacaagctggaacaactcagaaacagctgcgccggcagcggcagcggcagcaacgggcttctccctgatgacaagcttaccctcttctgcgaggtgagtgttgtgcaagattctgtcaacatttctggccagaataccatgaacatggtaaaggttcctgagtgccggctggcagatgagttaggaggactgtgggagaattcccggttcacagactgctgcttgtgtgttgccggccaggaattccaggctcacaaggctatcttagcagctcgttctccggtttttagtgccatgtttgaacatgaaatggaggagagcaaaaagaatcgagttgaaatcaatgatgtggagcctgaagtttttaaggaaatgatgtgcttcatttacacggggaaggctccaaacctcgacaaaatggctgatgatttgctggcagctgctgacaagtatgccctggagcgcttaaaggtcatgtgtgaggatgccctctgcagtaacctgtccgtggagaacgctgcagaaattctcatcctggccgacctccacagtgcagatcagttgaaaactcaggcagtggatttcatcaactatcatgcttcggatgtcttggagacctctgggtggaagtcaatggtggtgtcacatccccacttggtggctgaggcataccgctctctggcttcagcacagtgcccttttctgggacccccacgcaaacgcctgaagcaatccggcagcggcagcccggcggcgaaacgcgtgaaactggattacccatacgatgttccagattacgcttaa

SEQ ID NO: 1437 - DNA, 1056 bp, synthetic construct
  source 1..1056: mol_type = other DNA; note = OMOMYC-(GS)4-SPOP-NLS-HA nucleic acid
atgtctgataccgaggaaaatgtcaagcggagaacccacaacgtgctggaaagacagagacggaatgagctgaagcgctccttcttcgccctgcgggaccagatccccgagctggaaaacaacgagaaggcccctaaggtggtgatcctgaaaaaggctacagcctacatcctgagcgtgcaggccgagacccagaaactgatcagcgagatcgacctgctgagaaagcagaacgagcagctgaagcacaagctggaacaactcagaaacagctgcgccggcagcggcagcggcagcggcagcaacgggcttctccctgatgacaagcttaccctcttctgcgaggtgagtgttgtgcaagattctgtcaacatttctggccagaataccatgaacatggtaaaggttcctgagtgccggctggcagatgagttaggaggactgtgggagaattcccggttcacagactgctgcttgtgtgttgccggccaggaattccaggctcacaaggctatcttagcagctcgttctccggtttttagtgccatgtttgaacatgaaatggaggagagcaaaaagaatcgagttgaaatcaatgatgtggagcctgaagtttttaaggaaatgatgtgcttcatttacacggggaaggctccaaacctcgacaaaatggctgatgatttgctggcagctgctgacaagtatgccctggagcgcttaaaggtcatgtgtgaggatgccctctgcagtaacctgtccgtggagaacgctgcagaaattctcatcctggccgacctccacagtgcagatcagttgaaaactcaggcagtggatttcatcaactatcatgcttcggatgtcttggagacctctgggtggaagtcaatggtggtgtcacatccccacttggtggctgaggcataccgctctctggcttcagcacagtgcccttttctgggacccccacgcaaacgcctgaagcaatccggcagcggcagcccggcggcgaaacgcgtgaaactggattacccatacgatgttccagattacgcttaa

SEQ ID NO: 1438 - DNA, 1062 bp, synthetic construct
  source 1..1062: mol_type = other DNA; note = OMOMYC-(GS)5-SPOP-NLS-HA nucleic acid
atgtctgataccgaggaaaatgtcaagcggagaacccacaacgtgctggaaagacagagacggaatgagctgaagcgctccttcttcgccctgcgggaccagatccccgagctggaaaacaacgagaaggcccctaaggtggtgatcctgaaaaaggctacagcctacatcctgagcgtgcaggccgagacccagaaactgatcagcgagatcgacctgctgagaaagcagaacgagcagctgaagcacaagctggaacaactcagaaacagctgcgccggcagcggcagcggcagcggcagcggcagcaacgggcttctccctgatgacaagcttaccctcttctgcgaggtgagtgttgtgcaagattctgtcaacatttctggccagaataccatgaacatggtaaaggttcctgagtgccggctggcagatgagttaggaggactgtgggagaattcccggttcacagactgctgcttgtgtgttgccggccaggaattccaggctcacaaggctatcttagcagctcgttctccggtttttagtgccatgtttgaacatgaaatggaggagagcaaaaagaatcgagttgaaatcaatgatgtggagcctgaagtttttaaggaaatgatgtgcttcatttacacggggaaggctccaaacctcgacaaaatggctgatgatttgctggcagctgctgacaagtatgccctggagcgcttaaaggtcatgtgtgaggatgccctctgcagtaacctgtccgtggagaacgctgcagaaattctcatcctggccgacctccacagtgcagatcagttgaaaactcaggcagtggatttcatcaactatcatgcttcggatgtcttggagacctctgggtggaagtcaatggtggtgtcacatccccacttggtggctgaggcataccgctctctggcttcagcacagtgcccttttctgggacccccacgcaaacgcctgaagcaatccggcagcggcagcccggcggcgaaacgcgtgaaactggattacccatacgatgttccagattacgcttaa

SEQ ID NO: 1439 - DNA, 1068 bp, synthetic construct
  source 1..1068: mol_type = other DNA; note = OMOMYC-(GS)6-SPOP-NLS-HA nucleic acid
atgtctgataccgaggaaaatgtcaagcggagaacccacaacgtgctggaaagacagagacggaatgagctgaagcgctccttcttcgccctgcgggaccagatccccgagctggaaaacaacgagaaggcccctaaggtggtgatcctgaaaaaggctacagcctacatcctgagcgtgcaggccgagacccagaaactgatcagcgagatcgacctgctgagaaagcagaacgagcagctgaagcacaagctggaacaactcagaaacagctgcgccggcagcggcagcggcagcggcagcggcagcggcagcaacgggcttctccctgatgacaagcttaccctcttctgcgaggtgagtgttgtgcaagattctgtcaacatttctggccagaataccatgaacatggtaaaggttcctgagtgccggctggcagatgagttaggaggactgtgggagaattcccggttcacagactgctgcttgtgtgttgccggccaggaattccaggctcacaaggctatcttagcagctcgttctccggtttttagtgccatgtttgaacatgaaatggaggagagcaaaaagaatcgagttgaaatcaatgatgtggagcctgaagtttttaaggaaatgatgtgcttcatttacacggggaaggctccaaacctcgacaaaatggctgatgatttgctggcagctgctgacaagtatgccctggagcgcttaaaggtcatgtgtgaggatgccctctgcagtaacctgtccgtggagaacgctgcagaaattctcatcctggccgacctccacagtgcagatcagttgaaaactcaggcagtggatttcatcaactatcatgcttcggatgtcttggagacctctgggtggaagtcaatggtggtgtcacatccccacttggtggctgaggcataccgctctctggcttcagcacagtgcccttttctgggacccccacgcaaacgcctgaagcaatccggcagcggcagcccggcggcgaaacgcgtgaaactggattacccatacgatgttccagattacgcttaa

SEQ ID NO: 1440 - DNA, 837 bp, synthetic construct
  source 1..837: mol_type = other DNA; note = FOXP3DBD-(GS)1-CHIP-NLS nucleic acid
atgcggccccccttcacctacgccacactgatcagatgggccatcctggaagccccagaaaaacagcgcacccttaacgagatctaccactggttcaccagaatgttcgcctttttccggaaccaccctgccacctggaagaacgccattcggcacaacctgtctctgcacaagtgcttcgtgcgggtcgagagcgagaagggagctgtgtggaccgtggacgagctggagttccggaagaagcggagccaaagaccaagcaggggcagccggctgaacttcggggacgacatccccagcgctcttcgaatcgcgaagaagaagcgctggaacagcattgaggagcggcgcatccaccaggagagcgagctgcactcctacctctccaggctcattgccgcggagcgtgagagggagctggaagagtgccagcgaaaccacgagggtgatgaggacgacagccacgtccgggcccagcaggcctgcattgaggccaagcacgacaagtacatggcggacatggacgagcttttttctcaggtggatgagaagaggaagaagcgagacatccccgactacctgtgtggcaagatcagctttgagctgatgcgggagccgtgcatcacgcccagtggcatcacctacgaccgcaaggacatcgaggagcacctgcagcgtgtgggtcattttgacccggtgaccaggagccccctgacccaggaacagctcatccccaacttggctatgaaggaggttattgacgcattcatctctgagaatggctgggtggaggactacggcagcggcagcccggcggcgaaacgcgtgaaactggat

SEQ ID NO: 1441 - DNA, 843 bp, synthetic construct
  source 1..843: mol_type = other DNA; note = FOXP3DBD-(GS)2-CHIP-NLS nucleic acid
atgcggccccccttcacctacgccacactgatcagatgggccatcctggaagccccagaaaaacagcgcacccttaacgagatctaccactggttcaccagaatgttcgcctttttccggaaccaccctgccacctggaagaacgccattcggcacaacctgtctctgcacaagtgcttcgtgcgggtcgagagcgagaagggagctgtgtggaccgtggacgagctggagttccggaagaagcggagccaaagaccaagcaggggcagcggcagccggctgaacttcggggacgacatccccagcgctcttcgaatcgcgaagaagaagcgctggaacagcattgaggagcggcgcatccaccaggagagcgagctgcactcctacctctccaggctcattgccgcggagcgtgagagggagctggaagagtgccagcgaaaccacgagggtgatgaggacgacagccacgtccgggcccagcaggcctgcattgaggccaagcacgacaagtacatggcggacatggacgagcttttttctcaggtggatgagaagaggaagaagcgagacatccccgactacctgtgtggcaagatcagctttgagctgatgcgggagccgtgcatcacgcccagtggcatcacctacgaccgcaaggacatcgaggagcacctgcagcgtgtgggtcattttgacccggtgaccaggagccccctgacccaggaacagctcatccccaacttggctatgaaggaggttattgacgcattcatctctgagaatggctgggtggaggactacggcagcggcagcccggcggcgaaacgcgtgaaactggat

SEQ ID NO: 1442 - DNA, 849 bp, synthetic construct
  source 1..849: mol_type = other DNA; note = FOXP3DBD-(GS)3-CHIP-NLS nucleic acid
atgcggccccccttcacctacgccacactgatcagatgggccatcctggaagccccagaaaaacagcgcacccttaacgagatctaccactggttcaccagaatgttcgcctttttccggaaccaccctgccacctggaagaacgccattcggcacaacctgtctctgcacaagtgcttcgtgcgggtcgagagcgagaagggagctgtgtggaccgtggacgagctggagttccggaagaagcggagccaaagaccaagcaggggcagcggcagcggcagccggctgaacttcggggacgacatccccagcgctcttcgaatcgcgaagaagaagcgctggaacagcattgaggagcggcgcatccaccaggagagcgagctgcactcctacctctccaggctcattgccgcggagcgtgagagggagctggaagagtgccagcgaaaccacgagggtgatgaggacgacagccacgtccgggcccagcaggcctgcattgaggccaagcacgacaagtacatggcggacatggacgagcttttttctcaggtggatgagaagaggaagaagcgagacatccccgactacctgtgtggcaagatcagctttgagctgatgcgggagccgtgcatcacgcccagtggcatcacctacgaccgcaaggacatcgaggagcacctgcagcgtgtgggtcattttgacccggtgaccaggagccccctgacccaggaacagctcatccccaacttggctatgaaggaggttattgacgcattcatctctgagaatggctgggtggaggactacggcagcggcagcccggcggcgaaacgcgtgaaactggat

SEQ ID NO: 1443 - DNA, 855 bp, synthetic construct
  source 1..855: mol_type = other DNA; note = FOXP3DBD-(GS)4-CHIP-NLS nucleic acid
atgcggccccccttcacctacgccacactgatcagatgggccatcctggaagccccagaaaaacagcgcacccttaacgagatctaccactggttcaccagaatgttcgcctttttccggaaccaccctgccacctggaagaacgccattcggcacaacctgtctctgcacaagtgcttcgtgcgggtcgagagcgagaagggagctgtgtggaccgtggacgagctggagttccggaagaagcggagccaaagaccaagcaggggcagcggcagcggcagcggcagccggctgaacttcggggacgacatccccagcgctcttcgaatcgcgaagaagaagcgctggaacagcattgaggagcggcgcatccaccaggagagcgagctgcactcctacctctccaggctcattgccgcggagcgtgagagggagctggaagagtgccagcgaaaccacgagggtgatgaggacgacagccacgtccgggcccagcaggcctgcattgaggccaagcacgacaagtacatggcggacatggacgagcttttttctcaggtggatgagaagaggaagaagcgagacatccccgactacctgtgtggcaagatcagctttgagctgatgcgggagccgtgcatcacgcccagtggcatcacctacgaccgcaaggacatcgaggagcacctgcagcgtgtgggtcattttgacccggtgaccaggagccccctgacccaggaacagctcatccccaacttggctatgaaggaggttattgacgcattcatctctgagaatggctgggtggaggactacggcagcggcagcccggcggcgaaacgcgtgaaactggat

SEQ ID NO: 1444 - DNA, 861 bp, synthetic construct
  source 1..861: mol_type = other DNA; note = FOXP3DBD-(GS)5-CHIP-NLS nucleic acid
atgcggccccccttcacctacgccacactgatcagatgggccatcctggaagccccagaaaaacagcgcacccttaacgagatctaccactggttcaccagaatgttcgcctttttccggaaccaccctgccacctggaagaacgccattcggcacaacctgtctctgcacaagtgcttcgtgcgggtcgagagcgagaagggagctgtgtggaccgtggacgagctggagttccggaagaagcggagccaaagaccaagcaggggcagcggcagcggcagcggcagcggcagccggctgaacttcggggacgacatccccagcgctcttcgaatcgcgaagaagaagcgctggaacagcattgaggagcggcgcatccaccaggagagcgagctgcactcctacctctccaggctcattgccgcggagcgtgagagggagctggaagagtgccagcgaaaccacgagggtgatgaggacgacagccacgtccgggcccagcaggcctgcattgaggccaagcacgacaagtacatggcggacatggacgagcttttttctcaggtggatgagaagaggaagaagcgagacatccccgactacctgtgtggcaagatcagctttgagctgatgcgggagccgtgcatcacgcccagtggcatcacctacgaccgcaaggacatcgaggagcacctgcagcgtgtgggtcattttgacccggtgaccaggagccccctgacccaggaacagctcatccccaacttggctatgaaggaggttattgacgcattcatctctgagaatggctgggtggaggactacggcagcggcagcccggcggcgaaacgcgtgaaactggat

SEQ ID NO: 1445 - DNA, 867 bp, synthetic construct
  source 1..867: mol_type = other DNA; note = FOXP3DBD-(GS)6-CHIP-NLS nucleic acid
atgcggccccccttcacctacgccacactgatcagatgggccatcctggaagccccagaaaaacagcgcacccttaacgagatctaccactggttcaccagaatgttcgcctttttccggaaccaccctgccacctggaagaacgccattcggcacaacctgtctctgcacaagtgcttcgtgcgggtcgagagcgagaagggagctgtgtggaccgtggacgagctggagttccggaagaagcggagccaaagaccaagcaggggcagcggcagcggcagcggcagcggcagcggcagccggctgaacttcggggacgacatccccagcgctcttcgaatcgcgaagaagaagcgctggaacagcattgaggagcggcgcatccaccaggagagcgagctgcactcctacctctccaggctcattgccgcggagcgtgagagggagctggaagagtgccagcgaaaccacgagggtgatgaggacgacagccacgtccgggcccagcaggcctgcattgaggccaagcacgacaagtacatggcggacatggacgagcttttttctcaggtggatgagaagaggaagaagcgagacatccccgactacctgtgtggcaagatcagctttgagctgatgcgggagccgtgcatcacgcccagtggcatcacctacgaccgcaaggacatcgaggagcacctgcagcgtgtgggtcattttgacccggtgaccaggagccccctgacccaggaacagctcatccccaacttggctatgaaggaggttattgacgcattcatctctgagaatggctgggtggaggactacggcagcggcagcccggcggcgaaacgcgtgaaactggat

SEQ ID NO: 1446 - DNA, 867 bp, synthetic construct
  source 1..867: mol_type = other DNA; note = FOXP3DBD-(GS)1-CHIP-NLS-HA nucleic acid
atgcggccccccttcacctacgccacactgatcagatgggccatcctggaagccccagaaaaacagcgcacccttaacgagatctaccactggttcaccagaatgttcgcctttttccggaaccaccctgccacctggaagaacgccattcggcacaacctgtctctgcacaagtgcttcgtgcgggtcgagagcgagaagggagctgtgtggaccgtggacgagctggagttccggaagaagcggagccaaagaccaagcaggggcagccggctgaacttcggggacgacatccccagcgctcttcgaatcgcgaagaagaagcgctggaacagcattgaggagcggcgcatccaccaggagagcgagctgcactcctacctctccaggctcattgccgcggagcgtgagagggagctggaagagtgccagcgaaaccacgagggtgatgaggacgacagccacgtccgggcccagcaggcctgcattgaggccaagcacgacaagtacatggcggacatggacgagcttttttctcaggtggatgagaagaggaagaagcgagacatccccgactacctgtgtggcaagatcagctttgagctgatgcgggagccgtgcatcacgcccagtggcatcacctacgaccgcaaggacatcgaggagcacctgcagcgtgtgggtcattttgacccggtgaccaggagccccctgacccaggaacagctcatccccaacttggctatgaaggaggttattgacgcattcatctctgagaatggctgggtggaggactacggcagcggcagcccggcggcgaaacgcgtgaaactggattacccatacgatgttccagattacgcttaa

SEQ ID NO: 1447 - DNA, 873 bp, synthetic construct
  source 1..873: mol_type = other DNA; note = FOXP3DBD-(GS)2-CHIP-NLS-HA nucleic acid
atgcggccccccttcacctacgccacactgatcagatgggccatcctggaagccccagaaaaacagcgcacccttaacgagatctaccactggttcaccagaatgttcgcctttttccggaaccaccctgccacctggaagaacgccattcggcacaacctgtctctgcacaagtgcttcgtgcgggtcgagagcgagaagggagctgtgtggaccgtggacgagctggagttccggaagaagcggagccaaagaccaagcaggggcagcggcagccggctgaacttcggggacgacatccccagcgctcttcgaatcgcgaagaagaagcgctggaacagcattgaggagcggcgcatccaccaggagagcgagctgcactcctacctctccaggctcattgccgcggagcgtgagagggagctggaagagtgccagcgaaaccacgagggtgatgaggacgacagccacgtccgggcccagcaggcctgcattgaggccaagcacgacaagtacatggcggacatggacgagcttttttctcaggtggatgagaagaggaagaagcgagacatccccgactacctgtgtggcaagatcagctttgagctgatgcgggagccgtgcatcacgcccagtggcatcacctacgaccgcaaggacatcgaggagcacctgcagcgtgtgggtcattttgacccggtgaccaggagccccctgacccaggaacagctcatccccaacttggctatgaaggaggttattgacgcattcatctctgagaatggctgggtggaggactacggcagcggcagcccggcggcgaaacgcgtgaaactggattacccatacgatgttccagattacgcttaa

SEQ ID NO: 1448 - DNA, 879 bp, synthetic construct
  source 1..879: mol_type = other DNA; note = FOXP3DBD-(GS)3-CHIP-NLS-HA nucleic acid
atgcggccccccttcacctacgccacactgatcagatgggccatcctggaagccccagaaaaacagcgcacccttaacgagatctaccactggttcaccagaatgttcgcctttttccggaaccaccctgccacctggaagaacgccattcggcacaacctgtctctgcacaagtgcttcgtgcgggtcgagagcgagaagggagctgtgtggaccgtggacgagctggagttccggaagaagcggagccaaagaccaagcaggggcagcggcagcggcagccggctgaacttcggggacgacatccccagcgctcttcgaatcgcgaagaagaagcgctggaacagcattgaggagcggcgcatccaccaggagagcgagctgcactcctacctctccaggctcattgccgcggagcgtgagagggagctggaagagtgccagcgaaaccacgagggtgatgaggacgacagccacgtccgggcccagcaggcctgcattgaggccaagcacgacaagtacatggcggacatggacgagcttttttctcaggtggatgagaagaggaagaagcgagacatccccgactacctgtgtggcaagatcagctttgagctgatgcgggagccgtgcatcacgcccagtggcatcacctacgaccgcaaggacatcgaggagcacctgcagcgtgtgggtcattttgacccggtgaccaggagccccctgacccaggaacagctcatccccaacttggctatgaaggaggttattgacgcattcatctctgagaatggctgggtggaggactacggcagcggcagcccggcggcgaaacgcgtgaaactggattacccatacgatgttccagattacgcttaa

SEQ ID NO: 1449 - DNA, 885 bp, synthetic construct
  source 1..885: mol_type = other DNA; note = FOXP3DBD-(GS)4-CHIP-NLS-HA nucleic acid
atgcggccccccttcacctacgccacactgatcagatgggccatcctggaagccccagaaaaacagcgcacccttaacgagatctaccactggttcaccagaatgttcgcctttttccggaaccaccctgccacctggaagaacgccattcggcacaacctgtctctgcacaagtgcttcgtgcgggtcgagagcgagaagggagctgtgtggaccgtggacgagctggagttccggaagaagcggagccaaagaccaagcaggggcagcggcagcggcagcggcagccggctgaacttcggggacgacatccccagcgctcttcgaatcgcgaagaagaagcgctggaacagcattgaggagcggcgcatccaccaggagagcgagctgcactcctacctctccaggctcattgccgcggagcgtgagagggagctggaagagtgccagcgaaaccacgagggtgatgaggacgacagccacgtccgggcccagcaggcctgcattgaggccaagcacgacaagtacatggcggacatggacgagcttttttctcaggtggatgagaagaggaagaagcgagacatccccgactacctgtgtggcaagatcagctttgagctgatgcgggagccgtgcatcacgcccagtggcatcacctacgaccgcaaggacatcgaggagcacctgcagcgtgtgggtcattttgacccggtgaccaggagccccctgacccaggaacagctcatccccaacttggctatgaaggaggttattgacgcattcatctctgagaatggctgggtggaggactacggcagcggcagcccggcggcgaaacgcgtgaaactggattacccatacgatgttccagattacgcttaa

SEQ ID NO: 1450 - DNA, 891 bp, synthetic construct
  source 1..891: mol_type = other DNA; note = FOXP3DBD-(GS)5-CHIP-NLS-HA nucleic acid
atgcggccccccttcacctacgccacactgatcagatgggccatcctggaagccccagaaaaacagcgcacccttaacgagatctaccactggttcaccagaatgttcgcctttttccggaaccaccctgccacctggaagaacgccattcggcacaacctgtctctgcacaagtgcttcgtgcgggtcgagagcgagaagggagctgtgtggaccgtggacgagctggagttccggaagaagcggagccaaagaccaagcaggggcagcggcagcggcagcggcagcggcagccggctgaacttcggggacgacatccccagcgctcttcgaatcgcgaagaagaagcgctggaacagcattgaggagcggcgcatccaccaggagagcgagctgcactcctacctctccaggctcattgccgcggagcgtgagagggagctggaagagtgccagcgaaaccacgagggtgatgaggacgacagccacgtccgggcccagcaggcctgcattgaggccaagcacgacaagtacatggcggacatggacgagcttttttctcaggtggatgagaagaggaagaagcgagacatccccgactacctgtgtggcaagatcagctttgagctgatgcgggagccgtgcatcacgcccagtggcatcacctacgaccgcaaggacatcgaggagcacctgcagcgtgtgggtcattttgacccggtgaccaggagccccctgacccaggaacagctcatccccaacttggctatgaaggaggttattgacgcattcatctctgagaatggctgggtggaggactacggcagcggcagcccggcggcgaaacgcgtgaaactggattacccatacgatgttccagattacgcttaa

SEQ ID NO: 1451 - DNA, 897 bp, synthetic construct
  source 1..897: mol_type = other DNA; note = FOXP3DBD-(GS)6-CHIP-NLS-HA nucleic acid
atgcggccccccttcacctacgccacactgatcagatgggccatcctggaagccccagaaaaacagcgcacccttaacgagatctaccactggttcaccagaatgttcgcctttttccggaaccaccctgccacctggaagaacgccattcggcacaacctgtctctgcacaagtgcttcgtgcgggtcgagagcgagaagggagctgtgtggaccgtggacgagctggagttccggaagaagcggagccaaagaccaagcaggggcagcggcagcggcagcggcagcggcagcggcagccggctgaacttcggggacgacatccccagcgctcttcgaatcgcgaagaagaagcgctggaacagcattgaggagcggcgcatccaccaggagagcgagctgcactcctacctctccaggctcattgccgcggagcgtgagagggagctggaagagtgccagcgaaaccacgagggtgatgaggacgacagccacgtccgggcccagcaggcctgcattgaggccaagcacgacaagtacatggcggacatggacgagcttttttctcaggtggatgagaagaggaagaagcgagacatccccgactacctgtgtggcaagatcagctttgagctgatgcgggagccgtgcatcacgcccagtggcatcacctacgaccgcaaggacatcgaggagcacctgcagcgtgtgggtcattttgacccggtgaccaggagccccctgacccaggaacagctcatccccaacttggctatgaaggaggttattgacgcattcatctctgagaatggctgggtggaggactacggcagcggcagcccggcggcgaaacgcgtgaaactggattacccatacgatgttccagattacgcttaa

SEQ ID NO: 1452 - DNA, 420 bp, synthetic construct
  source 1..420: mol_type = other DNA; note = NLS-DCAF1-(GS)1-FOXP3DBD nucleic acid
ccggcggcgaaacgcgtgaaactggatggcagcggcagcggcagccaggcgccgattaactttaccagccgcctgaaccgccgcgcgagctttccgaaatatggcggcgtggatggcggctgctttgatcgccatctgatttttagccgcggcagccggccccccttcacctacgccacactgatcagatgggccatcctggaagccccagaaaaacagcgcacccttaacgagatctaccactggttcaccagaatgttcgcctttttccggaaccaccctgccacctggaagaacgccattcggcacaacctgtctctgcacaagtgcttcgtgcgggtcgagagcgagaagggagctgtgtggaccgtggacgagctggagttccggaagaagcggagccaaagaccaagcaggtaa

SEQ ID NO: 1453 - DNA, 426 bp, synthetic construct
  source 1..426: mol_type = other DNA; note = NLS-DCAF1-(GS)2-FOXP3DBD nucleic acid
ccggcggcgaaacgcgtgaaactggatggcagcggcagcggcagccaggcgccgattaactttaccagccgcctgaaccgccgcgcgagctttccgaaatatggcggcgtggatggcggctgctttgatcgccatctgatttttagccgcggcagcggcagccggccccccttcacctacgccacactgatcagatgggccatcctggaagccccagaaaaacagcgcacccttaacgagatctaccactggttcaccagaatgttcgcctttttccggaaccaccctgccacctggaagaacgccattcggcacaacctgtctctgcacaagtgcttcgtgcgggtcgagagcgagaagggagctgtgtggaccgtggacgagctggagttccggaagaagcggagccaaagaccaagcaggtaa

SEQ ID NO: 1454 - DNA, 432 bp, synthetic construct
  source 1..432: mol_type = other DNA; note = NLS-DCAF1-(GS)3-FOXP3DBD nucleic acid
ccggcggcgaaacgcgtgaaactggatggcagcggcagcggcagccaggcgccgattaactttaccagccgcctgaaccgccgcgcgagctttccgaaatatggcggcgtggatggcggctgctttgatcgccatctgatttttagccgcggcagcggcagcggcagccggccccccttcacctacgccacactgatcagatgggccatcctggaagccccagaaaaacagcgcacccttaacgagatctaccactggttcaccagaatgttcgcctttttccggaaccaccctgccacctggaagaacgccattcggcacaacctgtctctgcacaagtgcttcgtgcgggtcgagagcgagaagggagctgtgtggaccgtggacgagctggagttccggaagaagcggagccaaagaccaagcaggtaa

SEQ ID NO: 1455 - DNA, 438 bp, synthetic construct
  source 1..438: mol_type = other DNA; note = NLS-DCAF1-(GS)4-FOXP3DBD nucleic acid
ccggcggcgaaacgcgtgaaactggatggcagcggcagcggcagccaggcgccgattaactttaccagccgcctgaaccgccgcgcgagctttccgaaatatggcggcgtggatggcggctgctttgatcgccatctgatttttagccgcggcagcggcagcggcagcggcagccggccccccttcacctacgccacactgatcagatgggccatcctggaagccccagaaaaacagcgcacccttaacgagatctaccactggttcaccagaatgttcgcctttttccggaaccaccctgccacctggaagaacgccattcggcacaacctgtctctgcacaagtgcttcgtgcgggtcgagagcgagaagggagctgtgtggaccgtggacgagctggagttccggaagaagcggagccaaagaccaagcaggtaa

SEQ ID NO: 1456 - DNA, 444 bp, synthetic construct
  source 1..444: mol_type = other DNA; note = NLS-DCAF1-(GS)5-FOXP3DBD nucleic acid
ccggcggcgaaacgcgtgaaactggatggcagcggcagcggcagccaggcgccgattaactttaccagccgcctgaaccgccgcgcgagctttccgaaatatggcggcgtggatggcggctgctttgatcgccatctgatttttagccgcggcagcggcagcggcagcggcagcggcagccggccccccttcacctacgccacactgatcagatgggccatcctggaagccccagaaaaacagcgcacccttaacgagatctaccactggttcaccagaatgttcgcctttttccggaaccaccctgccacctggaagaacgccattcggcacaacctgtctctgcacaagtgcttcgtgcgggtcgagagcgagaagggagctgtgtggaccgtggacgagctggagttccggaagaagcggagccaaagaccaagcaggtaa

SEQ ID NO: 1457 - DNA, 450 bp, synthetic construct
  source 1..450: mol_type = other DNA; note = NLS-DCAF1-(GS)6-FOXP3DBD nucleic acid
ccggcggcgaaacgcgtgaaactggatggcagcggcagcggcagccaggcgccgattaactttaccagccgcctgaaccgccgcgcgagctttccgaaatatggcggcgtggatggcggctgctttgatcgccatctgatttttagccgcggcagcggcagcggcagcggcagcggcagcggcagccggccccccttcacctacgccacactgatcagatgggccatcctggaagccccagaaaaacagcgcacccttaacgagatctaccactggttcaccagaatgttcgcctttttccggaaccaccctgccacctggaagaacgccattcggcacaacctgtctctgcacaagtgcttcgtgcgggtcgagagcgagaagggagctgtgtggaccgtggacgagctggagttccggaagaagcggagccaaagaccaagcaggtaa

SEQ ID NO: 1458 - DNA, 450 bp, synthetic construct
  source 1..450: mol_type = other DNA; note = HA-NLS-DCAF1-(GS)1-FOXP3DBD nucleic acid
atgtacccatacgatgttccagattacgctccggcggcgaaacgcgtgaaactggatggcagcggcagcggcagccaggcgccgattaactttaccagccgcctgaaccgccgcgcgagctttccgaaatatggcggcgtggatggcggctgctttgatcgccatctgatttttagccgcggcagccggccccccttcacctacgccacactgatcagatgggccatcctggaagccccagaaaaacagcgcacccttaacgagatctaccactggttcaccagaatgttcgcctttttccggaaccaccctgccacctggaagaacgccattcggcacaacctgtctctgcacaagtgcttcgtgcgggtcgagagcgagaagggagctgtgtggaccgtggacgagctggagttccggaagaagcggagccaaagaccaagcaggtaa

SEQ ID NO: 1459 - DNA, 456 bp, synthetic construct
  source 1..456: mol_type = other DNA; note = HA-NLS-DCAF1-(GS)2-FOXP3DBD nucleic acid
atgtacccatacgatgttccagattacgctccggcggcgaaacgcgtgaaactggatggcagcggcagcggcagccaggcgccgattaactttaccagccgcctgaaccgccgcgcgagctttccgaaatatggcggcgtggatggcggctgctttgatcgccatctgatttttagccgcggcagcggcagccggccccccttcacctacgccacactgatcagatgggccatcctggaagccccagaaaaacagcgcacccttaacgagatctaccactggttcaccagaatgttcgcctttttccggaaccaccctgccacctggaagaacgccattcggcacaacctgtctctgcacaagtgcttcgtgcgggtcgagagcgagaagggagctgtgtggaccgtggacgagctggagttccggaagaagcggagccaaagaccaagcaggtaa

SEQ ID NO: 1460 - DNA, 462 bp, synthetic construct
  source 1..462: mol_type = other DNA; note = HA-NLS-DCAF1-(GS)3-FOXP3DBD nucleic acid
atgtacccatacgatgttccagattacgctccggcggcgaaacgcgtgaaactggatggcagcggcagcggcagccaggcgccgattaactttaccagccgcctgaaccgccgcgcgagctttccgaaatatggcggcgtggatggcggctgctttgatcgccatctgatttttagccgcggcagcggcagcggcagccggccccccttcacctacgccacactgatcagatgggccatcctggaagccccagaaaaacagcgcacccttaacgagatctaccactggttcaccagaatgttcgcctttttccggaaccaccctgccacctggaagaacgccattcggcacaacctgtctctgcacaagtgcttcgtgcgggtcgagagcgagaagggagctgtgtggaccgtggacgagctggagttccggaagaagcggagccaaagaccaagcaggtaa

SEQ ID NO: 1461 - DNA, 468 bp, synthetic construct
  source 1..468: mol_type = other DNA; note = HA-NLS-DCAF1-(GS)4-FOXP3DBD nucleic acid
atgtacccatacgatgttccagattacgctccggcggcgaaacgcgtgaaactggatggcagcggcagcggcagccaggcgccgattaactttaccagccgcctgaaccgccgcgcgagctttccgaaatatggcggcgtggatggcggctgctttgatcgccatctgatttttagccgcggcagcggcagcggcagcggcagccggccccccttcacctacgccacactgatcagatgggccatcctggaagccccagaaaaacagcgcacccttaacgagatctaccactggttcaccagaatgttcgcctttttccggaaccaccctgccacctggaagaacgccattcggcacaacctgtctctgcacaagtgcttcgtgcgggtcgagagcgagaagggagctgtgtggaccgtggacgagctggagttccggaagaagcggagccaaagaccaagcaggtaa

SEQ ID NO: 1462 - DNA, 474 bp, synthetic construct
  source 1..474: mol_type = other DNA; note = HA-NLS-DCAF1-(GS)5-FOXP3DBD nucleic acid
atgtacccatacgatgttccagattacgctccggcggcgaaacgcgtgaaactggatggcagcggcagcggcagccaggcgccgattaactttaccagccgcctgaaccgccgcgcgagctttccgaaatatggcggcgtggatggcggctgctttgatcgccatctgatttttagccgcggcagcggcagcggcagcggcagcggcagccggccccccttcacctacgccacactgatcagatgggccatcctggaagccccagaaaaacagcgcacccttaacgagatctaccactggttcaccagaatgttcgcctttttccggaaccaccctgccacctggaagaacgccattcggcacaacctgtctctgcacaagtgcttcgtgcgggtcgagagcgagaagggagctgtgtggaccgtggacgagctggagttccggaagaagcggagccaaagaccaagcaggtaa

SEQ ID NO: 1463 - DNA, 480 bp, synthetic construct
  source 1..480: mol_type = other DNA; note = HA-NLS-DCAF1-(GS)6-FOXP3DBD nucleic acid
atgtacccatacgatgttccagattacgctccggcggcgaaacgcgtgaaactggatggcagcggcagcggcagccaggcgccgattaactttaccagccgcctgaaccgccgcgcgagctttccgaaatatggcggcgtggatggcggctgctttgatcgccatctgatttttagccgcggcagcggcagcggcagcggcagcggcagcggcagccggccccccttcacctacgccacactgatcagatgggccatcctggaagccccagaaaaacagcgcacccttaacgagatctaccactggttcaccagaatgttcgcctttttccggaaccaccctgccacctggaagaacgccattcggcacaacctgtctctgcacaagtgcttcgtgcgggtcgagagcgagaagggagctgtgtggaccgtggacgagctggagttccggaagaagcggagccaaagaccaagcaggtaa

SEQ ID NO: 1464 - DNA, 1383 bp, synthetic construct
  source 1..1383: mol_type = other DNA; note = NLS-FOXP3DBD-(GS)1-E6AP nucleic acid
ccggcggcgaaacgcgtgaaactggatggcagcggcagcggcagccggccccccttcacctacgccacactgatcagatgggccatcctggaagccccagaaaaacagcgcacccttaacgagatctaccactggttcaccagaatgttcgcctttttccggaaccaccctgccacctggaagaacgccattcggcacaacctgtctctgcacaagtgcttcgtgcgggtcgagagcgagaagggagctgtgtggaccgtggacgagctggagttccggaagaagcggagccaaagaccaagcaggggcagcaatccatatttgagactcaaagttagacgtgaccatatcatagatgatgcacttgtccggctagagatgatcgctatggaaaatcctgcagacttgaagaagcagttgtatgtggaatttgaaggagaacaaggagttgatgagggaggtgtttccaaagaattttttcagctggttgtggaggaaatcttcaatccagatattggtatgttcacatacgatgaatctacaaaattgttttggtttaatccatcttcttttgaaactgagggtcagtttactctgattggcatagtactgggtctggctatttacaataactgtatactggatgtacattttcccatggttgtctacaggaagctaatggggaaaaaaggaacttttcgtgacttgggagactctcacccagttctatatcagagtttaaaagatttattggagtatgaagggaatgtggaagatgacatgatgatcactttccagatatcacagacagatctttttggtaacccaatgatgtatgatctaaaggaaaatggtgataaaattccaattacaaatgaaaacaggaaggaatttgtcaatctttattctgactacattctcaataaatcagtagaaaaacagttcaaggcttttcggagaggttttcatatggtgaccaatgaatctcccttaaagtacttattcagaccagaagaaattgaattgcttatatgtggaagccggaatctagatttccaagcactagaagaaactacagaatatgacggtggctataccagggactctgttctgattagggagttctgggaaatcgttcattcatttacagatgaacagaaaagactcttcttgcagtttacaacgggcacagacagagcacctgtgggaggactaggaaaattaaagatgattatagccaaaaatggcccagacacagaaaggttacctacatctcatacttgctttaatgtgcttttacttccggaatactcaagcaaagaaaaacttaaagagagattgttgaaggccatcacgtatgccaaaggatttggcatgctgtaa

SEQ ID NO: 1465 - DNA, 1389 bp, synthetic construct
  source 1..1389: mol_type = other DNA; note = NLS-FOXP3DBD-(GS)2-E6AP nucleic acid
ccggcggcgaaacgcgtgaaactggatggcagcggcagcggcagccggccccccttcacctacgccacactgatcagatgggccatcctggaagccccagaaaaacagcgcacccttaacgagatctaccactggttcaccagaatgttcgcctttttccggaaccaccctgccacctggaagaacgccattcggcacaacctgtctctgcacaagtgcttcgtgcgggtcgagagcgagaagggagctgtgtggaccgtggacgagctggagttccggaagaagcggagccaaagaccaagcaggggcagcggcagcaatccatatttgagactcaaagttagacgtgaccatatcatagatgatgcacttgtccggctagagatgatcgctatggaaaatcctgcagacttgaagaagcagttgtatgtggaatttgaaggagaacaaggagttgatgagggaggtgtttccaaagaattttttcagctggttgtggaggaaatcttcaatccagatattggtatgttcacatacgatgaatctacaaaattgttttggtttaatccatcttcttttgaaactgagggtcagtttactctgattggcatagtactgggtctggctatttacaataactgtatactggatgtacattttcccatggttgtctacaggaagctaatggggaaaaaaggaacttttcgtgacttgggagactctcacccagttctatatcagagtttaaaagatttattggagtatgaagggaatgtggaagatgacatgatgatcactttccagatatcacagacagatctttttggtaacccaatgatgtatgatctaaaggaaaatggtgataaaattccaattacaaatgaaaacaggaaggaatttgtcaatctttattctgactacattctcaataaatcagtagaaaaacagttcaaggcttttcggagaggttttcatatggtgaccaatgaatctcccttaaagtacttattcagaccagaagaaattgaattgcttatatgtggaagccggaatctagatttccaagcactagaagaaactacagaatatgacggtggctataccagggactctgttctgattagggagttctgggaaatcgttcattcatttacagatgaacagaaaagactcttcttgcagtttacaacgggcacagacagagcacctgtgggaggactaggaaaattaaagatgattatagccaaaaatggcccagacacagaaaggttacctacatctcatacttgctttaatgtgcttttacttccggaatactcaagcaaagaaaaacttaaagagagattgttgaaggccatcacgtatgccaaaggatttggcatgctgtaa

SEQ ID NO: 1466 - DNA, 1395 bp, synthetic construct
  source 1..1395: mol_type = other DNA; note = NLS-FOXP3DBD-(GS)3-E6AP nucleic acid
ccggcggcgaaacgcgtgaaactggatggcagcggcagcggcagccggccccccttcacctacgccacactgatcagatgggccatcctggaagccccagaaaaacagcgcacccttaacgagatctaccactggttcaccagaatgttcgcctttttccggaaccaccctgccacctggaagaacgccattcggcacaacctgtctctgcacaagtgcttcgtgcgggtcgagagcgagaagggagctgtgtggaccgtggacgagctggagttccggaagaagcggagccaaagaccaagcaggggcagcggcagcggcagcaatccatatttgagactcaaagttagacgtgaccatatcatagatgatgcacttgtccggctagagatgatcgctatggaaaatcctgcagacttgaagaagcagttgtatgtggaatttgaaggagaacaaggagttgatgagggaggtgtttccaaagaattttttcagctggttgtggaggaaatcttcaatccagatattggtatgttcacatacgatgaatctacaaaattgttttggtttaatccatcttcttttgaaactgagggtcagtttactctgattggcatagtactgggtctggctatttacaataactgtatactggatgtacattttcccatggttgtctacaggaagctaatggggaaaaaaggaacttttcgtgacttgggagactctcacccagttctatatcagagtttaaaagatttattggagtatgaagggaatgtggaagatgacatgatgatcactttccagatatcacagacagatctttttggtaacccaatgatgtatgatctaaaggaaaatggtgataaaattccaattacaaatgaaaacaggaaggaatttgtcaatctttattctgactacattctcaataaatcagtagaaaaacagttcaaggcttttcggagaggttttcatatggtgaccaatgaatctcccttaaagtacttattcagaccagaagaaattgaattgcttatatgtggaagccggaatctagatttccaagcactagaagaaactacagaatatgacggtggctataccagggactctgttctgattagggagttctgggaaatcgttcattcatttacagatgaacagaaaagactcttcttgcagtttacaacgggcacagacagagcacctgtgggaggactaggaaaattaaagatgattatagccaaaaatggcccagacacagaaaggttacctacatctcatacttgctttaatgtgcttttacttccggaatactcaagcaaagaaaaacttaaagagagattgttgaaggccatcacgtatgccaaaggatttggcatgctgtaa

SEQ ID NO: 1467 - DNA, 1401 bp, synthetic construct
  source 1..1401: mol_type = other DNA; note = NLS-FOXP3DBD-(GS)4-E6AP nucleic acid
ccggcggcgaaacgcgtgaaactggatggcagcggcagcggcagccggccccccttcacctacgccacactgatcagatgggccatcctggaagccccagaaaaacagcgcacccttaacgagatctaccactggttcaccagaatgttcgcctttttccggaaccaccctgccacctggaagaacgccattcggcacaacctgtctctgcacaagtgcttcgtgcgggtcgagagcgagaagggagctgtgtggaccgtggacgagctggagttccggaagaagcggagccaaagaccaagcaggggcagcggcagcggcagcggcagcaatccatatttgagactcaaagttagacgtgaccatatcatagatgatgcacttgtccggctagagatgatcgctatggaaaatcctgcagacttgaagaagcagttgtatgtggaatttgaaggagaacaaggagttgatgagggaggtgtttccaaagaattttttcagctggttgtggaggaaatcttcaatccagatattggtatgttcacatacgatgaatctacaaaattgttttggtttaatccatcttcttttgaaactgagggtcagtttactctgattggcatagtactgggtctggctatttacaataactgtatactggatgtacattttcccatggttgtctacaggaagctaatggggaaaaaaggaacttttcgtgacttgggagactctcacccagttctatatcagagtttaaaagatttattggagtatgaagggaatgtggaagatgacatgatgatcactttccagatatcacagacagatctttttggtaacccaatgatgtatgatctaaaggaaaatggtgataaaattccaattacaaatgaaaacaggaaggaatttgtcaatctttattctgactacattctcaataaatcagtagaaaaacagttcaaggcttttcggagaggttttcatatggtgaccaatgaatctcccttaaagtacttattcagaccagaagaaattgaattgcttatatgtggaagccggaatctagatttccaagcactagaagaaactacagaatatgacggtggctataccagggactctgttctgattagggagttctgggaaatcgttcattcatttacagatgaacagaaaagactcttcttgcagtttacaacgggcacagacagagcacctgtgggaggactaggaaaattaaagatgattatagccaaaaatggcccagacacagaaaggttacctacatctcatacttgctttaatgtgcttttacttccggaatactcaagcaaagaaaaacttaaagagagattgttgaaggccatcacgtatgccaaaggatttggcatgctgtaa

SEQ ID NO: 1468 - DNA, 1407 bp, synthetic construct
  source 1..1407: mol_type = other DNA; note = NLS-FOXP3DBD-(GS)5-E6AP nucleic acid
ccggcggcgaaacgcgtgaaactggatggcagcggcagcggcagccggccccccttcacctacgccacactgatcagatgggccatcctggaagccccagaaaaacagcgcacccttaacgagatctaccactggttcaccagaatgttcgcctttttccggaaccaccctgccacctggaagaacgccattcggcacaacctgtctctgcacaagtgcttcgtgcgggtcgagagcgagaagggagctgtgtggaccgtggacgagctggagttccggaagaagcggagccaaagaccaagcaggggcagcggcagcggcagcggcagcggcagcaatccatatttgagactcaaagttagacgtgaccatatcatagatgatgcacttgtccggctagagatgatcgctatggaaaatcctgcagacttgaagaagcagttgtatgtggaatttgaaggagaacaaggagttgatgagggaggtgtttccaaagaattttttcagctggttgtggaggaaatcttcaatccagatattggtatgttcacatacgatgaatctacaaaattgttttggtttaatccatcttcttttgaaactgagggtcagtttactctgattggcatagtactgggtctggctatttacaataactgtatactggatgtacattttcccatggttgtctacaggaagctaatggggaaaaaaggaacttttcgtgacttgggagactctcacccagttctatatcagagtttaaaagatttattggagtatgaagggaatgtggaagatgacatgatgatcactttccagatatcacagacagatctttttggtaacccaatgatgtatgatctaaaggaaaatggtgataaaattccaattacaaatgaaaacaggaaggaatttgtcaatctttattctgactacattctcaataaatcagtagaaaaacagttcaaggcttttcggagaggttttcatatggtgaccaatgaatctcccttaaagtacttattcagaccagaagaaattgaattgcttatatgtggaagccggaatctagatttccaagcactagaagaaactacagaatatgacggtggctataccagggactctgttctgattagggagttctgggaaatcgttcattcatttacagatgaacagaaaagactcttcttgcagtttacaacgggcacagacagagcacctgtgggaggactaggaaaattaaagatgattatagccaaaaatggcccagacacagaaaggttacctacatctcatacttgctttaatgtgcttttacttccggaatactcaagcaaagaaaaacttaaagagagattgttgaaggccatcacgtatgccaaaggatttggcatgctgtaa

SEQ ID NO: 1469 - DNA, 1413 bp, synthetic construct
  source 1..1413: mol_type = other DNA; note = NLS-FOXP3DBD-(GS)6-E6AP nucleic acid
ccggcggcgaaacgcgtgaaactggatggcagcggcagcggcagccggccccccttcacctacgccacactgatcagatgggccatcctggaagccccagaaaaacagcgcacccttaacgagatctaccactggttcaccagaatgttcgcctttttccggaaccaccctgccacctggaagaacgccattcggcacaacctgtctctgcacaagtgcttcgtgcgggtcgagagcgagaagggagctgtgtggaccgtggacgagctggagttccggaagaagcggagccaaagaccaagcaggggcagcggcagcggcagcggcagcggcagcggcagcaatccatatttgagactcaaagttagacgtgaccatatcatagatgatgcacttgtccggctagagatgatcgctatggaaaatcctgcagacttgaagaagcagttgtatgtggaatttgaaggagaacaaggagttgatgagggaggtgtttccaaagaattttttcagctggttgtggaggaaatcttcaatccagatattggtatgttcacatacgatgaatctacaaaattgttttggtttaatccatcttcttttgaaactgagggtcagtttactctgattggcatagtactgggtctggctatttacaataactgtatactggatgtacattttcccatggttgtctacaggaagctaatggggaaaaaaggaacttttcgtgacttgggagactctcacccagttctatatcagagtttaaaagatttattggagtatgaagggaatgtggaagatgacatgatgatcactttccagatatcacagacagatctttttggtaacccaatgatgtatgatctaaaggaaaatggtgataaaattccaattacaaatgaaaacaggaaggaatttgtcaatctttattctgactacattctcaataaatcagtagaaaaacagttcaaggcttttcggagaggttttcatatggtgaccaatgaatctcccttaaagtacttattcagaccagaagaaattgaattgcttatatgtggaagccggaatctagatttccaagcactagaagaaactacagaatatgacggtggctataccagggactctgttctgattagggagttctgggaaatcgttcattcatttacagatgaacagaaaagactcttcttgcagtttacaacgggcacagacagagcacctgtgggaggactaggaaaattaaagatgattatagccaaaaatggcccagacacagaaaggttacctacatctcatacttgctttaatgtgcttttacttccggaatactcaagcaaagaaaaacttaaagagagattgttgaaggccatcacgtatgccaaaggatttggcatgctgtaa

SEQ ID NO: 1470 - DNA, 1413 bp, synthetic construct
  source 1..1413: mol_type = other DNA; note = HA-NLS-FOXP3DBD-(GS)1-E6AP nucleic acid
atgtacccatacgatgttccagattacgctccggcggcgaaacgcgtgaaactggatggcagcggcagcggcagccggccccccttcacctacgccacactgatcagatgggccatcctggaagccccagaaaaacagcgcacccttaacgagatctaccactggttcaccagaatgttcgcctttttccggaaccaccctgccacctggaagaacgccattcggcacaacctgtctctgcacaagtgcttcgtgcgggtcgagagcgagaagggagctgtgtggaccgtggacgagctggagttccggaagaagcggagccaaagaccaagcaggggcagcaatccatatttgagactcaaagttagacgtgaccatatcatagatgatgcacttgtccggctagagatgatcgctatggaaaatcctgcagacttgaagaagcagttgtatgtggaatttgaaggagaacaaggagttgatgagggaggtgtttccaaagaattttttcagctggttgtggaggaaatcttcaatccagatattggtatgttcacatacgatgaatctacaaaattgttttggtttaatccatcttcttttgaaactgagggtcagtttactctgattggcatagtactgggtctggctatttacaataactgtatactggatgtacattttcccatggttgtctacaggaagctaatggggaaaaaaggaacttttcgtgacttgggagactctcacccagttctatatcagagtttaaaagatttattggagtatgaagggaatgtggaagatgacatgatgatcactttccagatatcacagacagatctttttggtaacccaatgatgtatgatctaaaggaaaatggtgataaaattccaattacaaatgaaaacaggaaggaatttgtcaatctttattctgactacattctcaataaatcagtagaaaaacagttcaaggcttttcggagaggttttcatatggtgaccaatgaatctcccttaaagtacttattcagaccagaagaaattgaattgcttatatgtggaagccggaatctagatttccaagcactagaagaaactacagaatatgacggtggctataccagggactctgttctgattagggagttctgggaaatcgttcattcatttacagatgaacagaaaagactcttcttgcagtttacaacgggcacagacagagcacctgtgggaggactaggaaaattaaagatgattatagccaaaaatggcccagacacagaaaggttacctacatctcatacttgctttaatgtgcttttacttccggaatactcaagcaaagaaaaacttaaagagagattgttgaaggccatcacgtatgccaaaggatttggcatgctgtaa

SEQ ID NO: 1471 - DNA, 1419 bp, synthetic construct
  source 1..1419: mol_type = other DNA; note = HA-NLS-FOXP3DBD-(GS)2-E6AP nucleic acid
atgtacccatacgatgttccagattacgctccggcggcgaaacgcgtgaaactggatggcagcggcagcggcagccggccccccttcacctacgccacactgatcagatgggccatcctggaagccccagaaaaacagcgcacccttaacgagatctaccactggttcaccagaatgttcgcctttttccggaaccaccctgccacctggaagaacgccattcggcacaacctgtctctgcacaagtgcttcgtgcgggtcgagagcgagaagggagctgtgtggaccgtggacgagctggagttccggaagaagcggagccaaagaccaagcaggggcagcggcagcaatccatatttgagactcaaagttagacgtgaccatatcatagatgatgcacttgtccggctagagatgatcgctatggaaaatcctgcagacttgaagaagcagttgtatgtggaatttgaaggagaacaaggagttgatgagggaggtgtttccaaagaattttttcagctggttgtggaggaaatcttcaatccagatattggtatgttcacatacgatgaatctacaaaattgttttggtttaatccatcttcttttgaaactgagggtcagtttactctgattggcatagtactgggtctggctatttacaataactgtatactggatgtacattttcccatggttgtctacaggaagctaatggggaaaaaaggaacttttcgtgacttgggagactctcacccagttctatatcagagtttaaaagatttattggagtatgaagggaatgtggaagatgacatgatgatcactttccagatatcacagacagatctttttggtaacccaatgatgtatgatctaaaggaaaatggtgataaaattccaattacaaatgaaaacaggaaggaatttgtcaatctttattctgactacattctcaataaatcagtagaaaaacagttcaaggcttttcggagaggttttcatatggtgaccaatgaatctcccttaaagtacttattcagaccagaagaaattgaattgcttatatgtggaagccggaatctagatttccaagcactagaagaaactacagaatatgacggtggctataccagggactctgttctgattagggagttctgggaaatcgttcattcatttacagatgaacagaaaagactcttcttgcagtttacaacgggcacagacagagcacctgtgggaggactaggaaaattaaagatgattatagccaaaaatggcccagacacagaaaggttacctacatctcatacttgctttaatgtgcttttacttccggaatactcaagcaaagaaaaacttaaagagagattgttgaaggccatcacgtatgccaaaggatttggcatgctgtaa

SEQ ID NO: 1472 - DNA, 1425 bp, synthetic construct
  source 1..1425: mol_type = other DNA; note = HA-NLS-FOXP3DBD-(GS)3-E6AP nucleic acid
atgtacccatacgatgttccagattacgctccggcggcgaaacgcgtgaaactggatggcagcggcagcggcagccggccccccttcacctacgccacactgatcagatgggccatcctggaagccccagaaaaacagcgcacccttaacgagatctaccactggttcaccagaatgttcgcctttttccggaaccaccctgccacctggaagaacgccattcggcacaacctgtctctgcacaagtgcttcgtgcgggtcgagagcgagaagggagctgtgtggaccgtggacgagctggagttccggaagaagcggagccaaagaccaagcaggggcagcggcagcggcagcaatccatatttgagactcaaagttagacgtgaccatatcatagatgatgcacttgtccggctagagatgatcgctatggaaaatcctgcagacttgaagaagcagttgtatgtggaatttgaaggagaacaaggagttgatgagggaggtgtttccaaagaattttttcagctggttgtggaggaaatcttcaatccagatattggtatgttcacatacgatgaatctacaaaattgttttggtttaatccatcttcttttgaaactgagggtcagtttactctgattggcatagtactgggtctggctatttacaataactgtatactggatgtacattttcccatggttgtctacaggaagctaatggggaaaaaaggaacttttcgtgacttgggagactctcacccagttctatatcagagtttaaaagatttattggagtatgaagggaatgtggaagatgacatgatgatcactttccagatatcacagacagatctttttggtaacccaatgatgtatgatctaaaggaaaatggtgataaaattccaattacaaatgaaaacaggaaggaatttgtcaatctttattctgactacattctcaataaatcagtagaaaaacagttcaaggcttttcggagaggttttcatatggtgaccaatgaatctcccttaaagtacttattcagaccagaagaaattgaattgcttatatgtggaagccggaatctagatttccaagcactagaagaaactacagaatatgacggtggctataccagggactctgttctgattagggagttctgggaaatcgttcattcatttacagatgaacagaaaagactcttcttgcagtttacaacgggcacagacagagcacctgtgggaggactaggaaaattaaagatgattatagccaaaaatggcccagacacagaaaggttacctacatctcatacttgctttaatgtgcttttacttccggaatactcaagcaaagaaaaacttaaagagagattgttgaaggccatcacgtatgccaaaggatttggcatgctgtaa

SEQ ID NO: 1473 - DNA, 1431 bp, synthetic construct
  source 1..1431: mol_type = other DNA; note = HA-NLS-FOXP3DBD-(GS)4-E6AP nucleic acid
atgtacccatacgatgttccagattacgctccggcggcgaaacgcgtgaaactggatggcagcggcagcggcagccggccccccttcacctacgccacactgatcagatgggccatcctggaagccccagaaaaacagcgcacccttaacgagatctaccactggttcaccagaatgttcgcctttttccggaaccaccctgccacctggaagaacgccattcggcacaacctgtctctgcacaagtgcttcgtgcgggtcgagagcgagaagggagctgtgtggaccgtggacgagctggagttccggaagaagcggagccaaagaccaagcaggggcagcggcagcggcagcggcagcaatccatatttgagactcaaagttagacgtgaccatatcatagatgatgcacttgtccggctagagatgatcgctatggaaaatcctgcagacttgaagaagcagttgtatgtggaatttgaaggagaacaaggagttgatgagggaggtgtttccaaagaattttttcagctggttgtggaggaaatcttcaatccagatattggtatgttcacatacgatgaatctacaaaattgttttggtttaatccatcttcttttgaaactgagggtcagtttactctgattggcatagtactgggtctggctatttacaataactgtatactggatgtacattttcccatggttgtctacaggaagctaatggggaaaaaaggaacttttcgtgacttgggagactctcacccagttctatatcagagtttaaaagatttattggagtatgaagggaatgtggaagatgacatgatgatcactttccagatatcacagacagatctttttggtaacccaatgatgtatgatctaaaggaaaatggtgataaaattccaattacaaatgaaaacaggaaggaatttgtcaatctttattctgactacattctcaataaatcagtagaaaaacagttcaaggcttttcggagaggttttcatatggtgaccaatgaatctcccttaaagtacttattcagaccagaagaaattgaattgcttatatgtggaagccggaatctagatttccaagcactagaagaaactacagaatatgacggtggctataccagggactctgttctgattagggagttctgggaaatcgttcattcatttacagatgaacagaaaagactcttcttgcagtttacaacgggcacagacagagcacctgtgggaggactaggaaaattaaagatgattatagccaaaaatggcccagacacagaaaggttacctacatctcatacttgctttaatgtgcttttacttccggaatactcaagcaaagaaaaacttaaagagagattgttgaaggccatcacgtatgccaaaggatttggcatgctgtaa

SEQ ID NO: 1474 - DNA, 1437 bp, synthetic construct
  source 1..1437: mol_type = other DNA; note = HA-NLS-FOXP3DBD-(GS)5-E6AP nucleic acid
atgtacccatacgatgttccagattacgctccggcggcgaaacgcgtgaaactggatggcagcggcagcggcagccggccccccttcacctacgccacactgatcagatgggccatcctggaagccccagaaaaacagcgcacccttaacgagatctaccactggttcaccagaatgttcgcctttttccggaaccaccctgccacctggaagaacgccattcggcacaacctgtctctgcacaagtgcttcgtgcgggtcgagagcgagaagggagctgtgtggaccgtggacgagctggagttccggaagaagcggagccaaagaccaagcaggggcagcggcagcggcagcggcagcggcagcaatccatatttgagactcaaagttagacgtgaccatatcatagatgatgcacttgtccggctagagatgatcgctatggaaaatcctgcagacttgaagaagcagttgtatgtggaatttgaaggagaacaaggagttgatgagggaggtgtttccaaagaattttttcagctggttgtggaggaaatcttcaatccagatattggtatgttcacatacgatgaatctacaaaattgttttggtttaatccatcttcttttgaaactgagggtcagtttactctgattggcatagtactgggtctggctatttacaataactgtatactggatgtacattttcccatggttgtctacaggaagctaatggggaaaaaaggaacttttcgtgacttgggagactctcacccagttctatatcagagtttaaaagatttattggagtatgaagggaatgtggaagatgacatgatgatcactttccagatatcacagacagatctttttggtaacccaatgatgtatgatctaaaggaaaatggtgataaaattccaattacaaatgaaaacaggaaggaatttgtcaatctttattctgactacattctcaataaatcagtagaaaaacagttcaaggcttttcggagaggttttcatatggtgaccaatgaatctcccttaaagtacttattcagaccagaagaaattgaattgcttatatgtggaagccggaatctagatttccaagcactagaagaaactacagaatatgacggtggctataccagggactctgttctgattagggagttctgggaaatcgttcattcatttacagatgaacagaaaagactcttcttgcagtttacaacgggcacagacagagcacctgtgggaggactaggaaaattaaagatgattatagccaaaaatggcccagacacagaaaggttacctacatctcatacttgctttaatgtgcttttacttccggaatactcaagcaaagaaaaacttaaagagagattgttgaaggccatcacgtatgccaaaggatttggcatgctgtaa

SEQ ID NO: 1475 - DNA, 1443 bp, synthetic construct
  source 1..1443: mol_type = other DNA; note = HA-NLS-FOXP3DBD-(GS)6-E6AP nucleic acid
atgtacccatacgatgttccagattacgctccggcggcgaaacgcgtgaaactggatggcagcggcagcggcagccggccccccttcacctacgccacactgatcagatgggccatcctggaagccccagaaaaacagcgcacccttaacgagatctaccactggttcaccagaatgttcgcctttttccggaaccaccctgccacctggaagaacgccattcggcacaacctgtctctgcacaagtgcttcgtgcgggtcgagagcgagaagggagctgtgtggaccgtggacgagctggagttccggaagaagcggagccaaagaccaagcaggggcagcggcagcggcagcggcagcggcagcggcagcaatccatatttgagactcaaagttagacgtgaccatatcatagatgatgcacttgtccggctagagatgatcgctatggaaaatcctgcagacttgaagaagcagttgtatgtggaatttgaaggagaacaaggagttgatgagggaggtgtttccaaagaattttttcagctggttgtggaggaaatcttcaatccagatattggtatgttcacatacgatgaatctacaaaattgttttggtttaatccatcttcttttgaaactgagggtcagtttactctgattggcatagtactgggtctggctatttacaataactgtatactggatgtacattttcccatggttgtctacaggaagctaatggggaaaaaaggaacttttcgtgacttgggagactctcacccagttctatatcagagtttaaaagatttattggagtatgaagggaatgtggaagatgacatgatgatcactttccagatatcacagacagatctttttggtaacccaatgatgtatgatctaaaggaaaatggtgataaaattccaattacaaatgaaaacaggaaggaatttgtcaatctttattctgactacattctcaataaatcagtagaaaaacagttcaaggcttttcggagaggttttcatatggtgaccaatgaatctcccttaaagtacttattcagaccagaagaaattgaattgcttatatgtggaagccggaatctagatttccaagcactagaagaaactacagaatatgacggtggctataccagggactctgttctgattagggagttctgggaaatcgttcattcatttacagatgaacagaaaagactcttcttgcagtttacaacgggcacagacagagcacctgtgggaggactaggaaaattaaagatgattatagccaaaaatggcccagacacagaaaggttacctacatctcatacttgctttaatgtgcttttacttccggaatactcaagcaaagaaaaacttaaagagagattgttgaaggccatcacgtatgccaaaggatttggcatgctgtaa

SEQ ID NO: 1476 - DNA, 1371 bp, synthetic construct
  source 1..1371: mol_type = other DNA; note = FBXW7a-(GS)1-FOXP3DBD nucleic acid
aatcaggaactgctctctgtgggcagcaaaagacgacgaactggaggctctctgagaggtaacccttcctcaagccaggtagatgaagaacagatgaatcgtgtggtagaggaggaacagcaacagcaactcagacaacaagaggaggagcacactgcaaggaatggtgaagttgttggagtagaacctagacctggaggccaaaatgattcccagcaaggacagttggaagaaaacaataatagatttatttcggtagatgaggactcctcaggaaaccaagaagaacaagaggaagatgaagaacatgctggtgaacaagatgaggaggatgaggaggaggaggagatggaccaggagagtgacgattttgatcagtctgatgatagtagcagagaagatgaacatacacatactaacagtgtcacgaactccagtagtattgtggacctgcccgttcaccaactctcctccccattctatacaaaaacaacaaaaatgaaaagaaagttggaccatggttctgaggtccgctctttttctttgggaaagaaaccatgcaaagtctcagaatatacaagtaccactgggcttgtaccatgttcagcaacaccaacaacttttggggacctcagagcagccaatggccaagggcaacaacgacgccgaattacatctgtccagccacctacaggcctccaggaatggctaaaaatgtttcagagctggagtggaccagagaaattgcttgctttagatgaactcattgatagttgtgaaccaacacaagtaaaacatatgatgcaagtgatagaaccccagtttcaacgagacttcatttcattgctccctaaagagttggcactctatgtgctttcattcctggaacccaaagacctgctacaagcagctcagacatgtcgctactggagaattttggctgaagacaaccttctctggagagagaaatgcaaagaagaggggattgatgaaccattgcacatcaagagaagaaaagtaataaaaccaggtttcatacacagtccatggaaaagtgcatacatcagacagcacagaattgatactaactcgaggcgaggaggcagccggccccccttcacctacgccacactgatcagatgggccatcctggaagccccagaaaaacagcgcacccttaacgagatctaccactggttcaccagaatgttcgcctttttccggaaccaccctgccacctggaagaacgccattcggcacaacctgtctctgcacaagtgcttcgtgcgggtcgagagcgagaagggagctgtgtggaccgtggacgagctggagttccggaagaagcggagccaaagaccaagcaggtaa

SEQ ID NO: 1477 - DNA, 1377 bp, synthetic construct
  source 1..1377: mol_type = other DNA; note = FBXW7a-(GS)2-FOXP3DBD nucleic acid
aatcaggaactgctctctgtgggcagcaaaagacgacgaactggaggctctctgagaggtaacccttcctcaagccaggtagatgaagaacagatgaatcgtgtggtagaggaggaacagcaacagcaactcagacaacaagaggaggagcacactgcaaggaatggtgaagttgttggagtagaacctagacctggaggccaaaatgattcccagcaaggacagttggaagaaaacaataatagatttatttcggtagatgaggactcctcaggaaaccaagaagaacaagaggaagatgaagaacatgctggtgaacaagatgaggaggatgaggaggaggaggagatggaccaggagagtgacgattttgatcagtctgatgatagtagcagagaagatgaacatacacatactaacagtgtcacgaactccagtagtattgtggacctgcccgttcaccaactctcctccccattctatacaaaaacaacaaaaatgaaaagaaagttggaccatggttctgaggtccgctctttttctttgggaaagaaaccatgcaaagtctcagaatatacaagtaccactgggcttgtaccatgttcagcaacaccaacaacttttggggacctcagagcagccaatggccaagggcaacaacgacgccgaattacatctgtccagccacctacaggcctccaggaatggctaaaaatgtttcagagctggagtggaccagagaaattgcttgctttagatgaactcattgatagttgtgaaccaacacaagtaaaacatatgatgcaagtgatagaaccccagtttcaacgagacttcatttcattgctccctaaagagttggcactctatgtgctttcattcctggaacccaaagacctgctacaagcagctcagacatgtcgctactggagaattttggctgaagacaaccttctctggagagagaaatgcaaagaagaggggattgatgaaccattgcacatcaagagaagaaaagtaataaaaccaggtttcatacacagtccatggaaaagtgcatacatcagacagcacagaattgatactaactcgaggcgaggaggcagcggcagccggccccccttcacctacgccacactgatcagatgggccatcctggaagccccagaaaaacagcgcacccttaacgagatctaccactggttcaccagaatgttcgcctttttccggaaccaccctgccacctggaagaacgccattcggcacaacctgtctctgcacaagtgcttcgtgcgggtcgagagcgagaagggagctgtgtggaccgtggacgagctggagttccggaagaagcggagccaaagaccaagcaggtaa

SEQ ID NO: 1478 - DNA, 1383 bp, synthetic construct
  source 1..1383: mol_type = other DNA; note = FBXW7a-(GS)3-FOXP3DBD nucleic acid
aatcaggaactgctctctgtgggcagcaaaagacgacgaactggaggctctctgagaggtaacccttcctcaagccaggtagatgaagaacagatgaatcgtgtggtagaggaggaacagcaacagcaactcagacaacaagaggaggagcacactgcaaggaatggtgaagttgttggagtagaacctagacctggaggccaaaatgattcccagcaaggacagttggaagaaaacaataatagatttatttcggtagatgaggactcctcaggaaaccaagaagaacaagaggaagatgaagaacatgctggtgaacaagatgaggaggatgaggaggaggaggagatggaccaggagagtgacgattttgatcagtctgatgatagtagcagagaagatgaacatacacatactaacagtgtcacgaactccagtagtattgtggacctgcccgttcaccaactctcctccccattctatacaaaaacaacaaaaatgaaaagaaagttggaccatggttctgaggtccgctctttttctttgggaaagaaaccatgcaaagtctcagaatatacaagtaccactgggcttgtaccatgttcagcaacaccaacaacttttggggacctcagagcagccaatggccaagggcaacaacgacgccgaattacatctgtccagccacctacaggcctccaggaatggctaaaaatgtttcagagctggagtggaccagagaaattgcttgctttagatgaactcattgatagttgtgaaccaacacaagtaaaacatatgatgcaagtgatagaaccccagtttcaacgagacttcatttcattgctccctaaagagttggcactctatgtgctttcattcctggaacccaaagacctgctacaagcagctcagacatgtcgctactggagaattttggctgaagacaaccttctctggagagagaaatgcaaagaagaggggattgatgaaccattgcacatcaagagaagaaaagtaataaaaccaggtttcatacacagtccatggaaaagtgcatacatcagacagcacagaattgatactaactcgaggcgaggaggcagcggcagcggcagccggccccccttcacctacgccacactgatcagatgggccatcctggaagccccagaaaaacagcgcacccttaacgagatctaccactggttcaccagaatgttcgcctttttccggaaccaccctgccacctggaagaacgccattcggcacaacctgtctctgcacaagtgcttcgtgcgggtcgagagcgagaagggagctgtgtggaccgtggacgagctggagttccggaagaagcggagccaaagaccaagcaggtaa

SEQ ID NO: 1479 - DNA, 1389 bp, synthetic construct
  source 1..1389: mol_type = other DNA; note = FBXW7a-(GS)4-FOXP3DBD nucleic acid
aatcaggaactgctctctgtgggcagcaaaagacgacgaactggaggctctctgagaggtaacccttcctcaagccaggtagatgaagaacagatgaatcgtgtggtagaggaggaacagcaacagcaactcagacaacaagaggaggagcacactgcaaggaatggtgaagttgttggagtagaacctagacctggaggccaaaatgattcccagcaaggacagttggaagaaaacaataatagatttatttcggtagatgaggactcctcaggaaaccaagaagaacaagaggaagatgaagaacatgctggtgaacaagatgaggaggatgaggaggaggaggagatggaccaggagagtgacgattttgatcagtctgatgatagtagcagagaagatgaacatacacatactaacagtgtcacgaactccagtagtattgtggacctgcccgttcaccaactctcctccccattctatacaaaaacaacaaaaatgaaaagaaagttggaccatggttctgaggtccgctctttttctttgggaaagaaaccatgcaaagtctcagaatatacaagtaccactgggcttgtaccatgttcagcaacaccaacaacttttggggacctcagagcagccaatggccaagggcaacaacgacgccgaattacatctgtccagccacctacaggcctccaggaatggctaaaaatgtttcagagctggagtggaccagagaaattgcttgctttagatgaactcattgatagttgtgaaccaacacaagtaaaacatatgatgcaagtgatagaaccccagtttcaacgagacttcatttcattgctccctaaagagttggcactctatgtgctttcattcctggaacccaaagacctgctacaagcagctcagacatgtcgctactggagaattttggctgaagacaaccttctctggagagagaaatgcaaagaagaggggattgatgaaccattgcacatcaagagaagaaaagtaataaaaccaggtttcatacacagtccatggaaaagtgcatacatcagacagcacagaattgatactaactcgaggcgaggaggcagcggcagcggcagcggcagccggccccccttcacctacgccacactgatcagatgggccatcctggaagccccagaaaaacagcgcacccttaacgagatctaccactggttcaccagaatgttcgcctttttccggaaccaccctgccacctggaagaacgccattcggcacaacctgtctctgcacaagtgcttcgtgcgggtcgagagcgagaagggagctgtgtggaccgtggacgagctggagttccggaagaagcggagccaaagaccaagcaggtaa

SEQ ID NO: 1480 - DNA, 1395 bp, synthetic construct
  source 1..1395: mol_type = other DNA; note = FBXW7a-(GS)5-FOXP3DBD nucleic acid
aatcaggaactgctctctgtgggcagcaaaagacgacgaactggaggctctctgagaggtaacccttcctcaagccaggtagatgaagaacagatgaatcgtgtggtagaggaggaacagcaacagcaactcagacaacaagaggaggagcacactgcaaggaatggtgaagttgttggagtagaacctagacctggaggccaaaatgattcccagcaaggacagttggaagaaaacaataatagatttatttcggtagatgaggactcctcaggaaaccaagaagaacaagaggaagatgaagaacatgctggtgaacaagatgaggaggatgaggaggaggaggagatggaccaggagagtgacgattttgatcagtctgatgatagtagcagagaagatgaacatacacatactaacagtgtcacgaactccagtagtattgtggacctgcccgttcaccaactctcctccccattctatacaaaaacaacaaaaatgaaaagaaagttggaccatggttctgaggtccgctctttttctttgggaaagaaaccatgcaaagtctcagaatatacaagtaccactgggcttgtaccatgttcagcaacaccaacaacttttggggacctcagagcagccaatggccaagggcaacaacgacgccgaattacatctgtccagccacctacaggcctccaggaatggctaaaaatgtttcagagctggagtggaccagagaaattgcttgctttagatgaactcattgatagttgtgaaccaacacaagtaaaacatatgatgcaagtgatagaaccccagtttcaacgagacttcatttcattgctccctaaagagttggcactctatgtgctttcattcctggaacccaaagacctgctacaagcagctcagacatgtcgctactggagaattttggctgaagacaaccttctctggagagagaaatgcaaagaagaggggattgatgaaccattgcacatcaagagaagaaaagtaataaaaccaggtttcatacacagtccatggaaaagtgcatacatcagacagcacagaattgatactaactcgaggcgaggaggcagcggcagcggcagcggcagcggcagccggccccccttcacctacgccacactgatcagatgggccatcctggaagccccagaaaaacagcgcacccttaacgagatctaccactggttcaccagaatgttcgcctttttccggaaccaccctgccacctggaagaacgccattcggcacaacctgtctctgcacaagtgcttcgtgcgggtcgagagcgagaagggagctgtgtggaccgtggacgagctggagttccggaagaagcggagccaaagaccaagcaggtaa

SEQ ID NO: 1481 - DNA, 1401 bp, synthetic construct
  source 1..1401: mol_type = other DNA; note = FBXW7a-(GS)6-FOXP3DBD nucleic acid
aatcaggaactgctctctgtgggcagcaaaagacgacgaactggaggctctctgagaggtaacccttcctcaagccaggtagatgaagaacagatgaatcgtgtggtagaggaggaacagcaacagcaactcagacaacaagaggaggagcacactgcaaggaatggtgaagttgttggagtagaacctagacctggaggccaaaatgattcccagcaaggacagttggaagaaaacaataatagatttatttcggtagatgaggactcctcaggaaaccaagaagaacaagaggaagatgaagaacatgctggtgaacaagatgaggaggatgaggaggaggaggagatggaccaggagagtgacgattttgatcagtctgatgatagtagcagagaagatgaacatacacatactaacagtgtcacgaactccagtagtattgtggacctgcccgttcaccaactctcctccccattctatacaaaaacaacaaaaatgaaaagaaagttggaccatggttctgaggtccgctctttttctttgggaaagaaaccatgcaaagtctcagaatatacaagtaccactgggcttgtaccatgttcagcaacaccaacaacttttggggacctcagagcagccaatggccaagggcaacaacgacgccgaattacatctgtccagccacctacaggcctccaggaatggctaaaaatgtttcagagctggagtggaccagagaaattgcttgctttagatgaactcattgatagttgtgaaccaacacaagtaaaacatatgatgcaagtgatagaaccccagtttcaacgagacttcatttcattgctccctaaagagttggcactctatgtgctttcattcctggaacccaaagacctgctacaagcagctcagacatgtcgctactggagaattttggctgaagacaaccttctctggagagagaaatgcaaagaagaggggattgatgaaccattgcacatcaagagaagaaaagtaataaaaccaggtttcatacacagtccatggaaaagtgcatacatcagacagcacagaattgatactaactcgaggcgaggaggcagcggcagcggcagcggcagcggcagcggcagccggccccccttcacctacgccacactgatcagatgggccatcctggaagccccagaaaaacagcgcacccttaacgagatctaccactggttcaccagaatgttcgcctttttccggaaccaccctgccacctggaagaacgccattcggcacaacctgtctctgcacaagtgcttcgtgcgggtcgagagcgagaagggagctgtgtggaccgtggacgagctggagttccggaagaagcggagccaaagaccaagcaggtaa

SEQ ID NO: 1482 - DNA, 1401 bp, synthetic construct
  source 1..1401: mol_type = other DNA; note = HA-FBXW7a-(GS)1-FOXP3DBD nucleic acid
atgtacccatacgatgttccagattacgctaatcaggaactgctctctgtgggcagcaaaagacgacgaactggaggctctctgagaggtaacccttcctcaagccaggtagatgaagaacagatgaatcgtgtggtagaggaggaacagcaacagcaactcagacaacaagaggaggagcacactgcaaggaatggtgaagttgttggagtagaacctagacctggaggccaaaatgattcccagcaaggacagttggaagaaaacaataatagatttatttcggtagatgaggactcctcaggaaaccaagaagaacaagaggaagatgaagaacatgctggtgaacaagatgaggaggatgaggaggaggaggagatggaccaggagagtgacgattttgatcagtctgatgatagtagcagagaagatgaacatacacatactaacagtgtcacgaactccagtagtattgtggacctgcccgttcaccaactctcctccccattctatacaaaaacaacaaaaatgaaaagaaagttggaccatggttctgaggtccgctctttttctttgggaaagaaaccatgcaaagtctcagaatatacaagtaccactgggcttgtaccatgttcagcaacaccaacaacttttggggacctcagagcagccaatggccaagggcaacaacgacgccgaattacatctgtccagccacctacaggcctccaggaatggctaaaaatgtttcagagctggagtggaccagagaaattgcttgctttagatgaactcattgatagttgtgaaccaacacaagtaaaacatatgatgcaagtgatagaaccccagtttcaacgagacttcatttcattgctccctaaagagttggcactctatgtgctttcattcctggaacccaaagacctgctacaagcagctcagacatgtcgctactggagaattttggctgaagacaaccttctctggagagagaaatgcaaagaagaggggattgatgaaccattgcacatcaagagaagaaaagtaataaaaccaggtttcatacacagtccatggaaaagtgcatacatcagacagcacagaattgatactaactcgaggcgaggaggcagccggccccccttcacctacgccacactgatcagatgggccatcctggaagccccagaaaaacagcgcacccttaacgagatctaccactggttcaccagaatgttcgcctttttccggaaccaccctgccacctggaagaacgccattcggcacaacctgtctctgcacaagtgcttcgtgcgggtcgagagcgagaagggagctgtgtggaccgtggacgagctggagttccggaagaagcggagccaaagaccaagcaggtaa

SEQ ID NO: 1483 - DNA, 1407 bp, synthetic construct
  source 1..1407: mol_type = other DNA; note = HA-FBXW7a-(GS)2-FOXP3DBD nucleic acid
atgtacccatacgatgttccagattacgctaatcaggaactgctctctgtgggcagcaaaagacgacgaactggaggctctctgagaggtaacccttcctcaagccaggtagatgaagaacagatgaatcgtgtggtagaggaggaacagcaacagcaactcagacaacaagaggaggagcacactgcaaggaatggtgaagttgttggagtagaacctagacctggaggccaaaatgattcccagcaaggacagttggaagaaaacaataatagatttatttcggtagatgaggactcctcaggaaaccaagaagaacaagaggaagatgaagaacatgctggtgaacaagatgaggaggatgaggaggaggaggagatggaccaggagagtgacgattttgatcagtctgatgatagtagcagagaagatgaacatacacatactaacagtgtcacgaactccagtagtattgtggacctgcccgttcaccaactctcctccccattctatacaaaaacaacaaaaatgaaaagaaagttggaccatggttctgaggtccgctctttttctttgggaaagaaaccatgcaaagtctcagaatatacaagtaccactgggcttgtaccatgttcagcaacaccaacaacttttggggacctcagagcagccaatggccaagggcaacaacgacgccgaattacatctgtccagccacctacaggcctccaggaatggctaaaaatgtttcagagctggagtggaccagagaaattgcttgctttagatgaactcattgatagttgtgaaccaacacaagtaaaacatatgatgcaagtgatagaaccccagtttcaacgagacttcatttcattgctccctaaagagttggcactctatgtgctttcattcctggaacccaaagacctgctacaagcagctcagacatgtcgctactggagaattttggctgaagacaaccttctctggagagagaaatgcaaagaagaggggattgatgaaccattgcacatcaagagaagaaaagtaataaaaccaggtttcatacacagtccatggaaaagtgcatacatcagacagcacagaattgatactaactcgaggcgaggaggcagcggcagccggccccccttcacctacgccacactgatcagatgggccatcctggaagccccagaaaaacagcgcacccttaacgagatctaccactggttcaccagaatgttcgcctttttccggaaccaccctgccacctggaagaacgccattcggcacaacctgtctctgcacaagtgcttcgtgcgggtcgagagcgagaagggagctgtgtggaccgtggacgagctggagttccggaagaagcggagccaaagaccaagcaggtaa

SEQ ID NO: 1484 - DNA, 1413 bp, synthetic construct
  source 1..1413: mol_type = other DNA; note = HA-FBXW7a-(GS)3-FOXP3DBD nucleic acid
atgtacccatacgatgttccagattacgctaatcaggaactgctctctgtgggcagcaaaagacgacgaactggaggctctctgagaggtaacccttcctcaagccaggtagatgaagaacagatgaatcgtgtggtagaggaggaacagcaacagcaactcagacaacaagaggaggagcacactgcaaggaatggtgaagttgttggagtagaacctagacctggaggccaaaatgattcccagcaaggacagttggaagaaaacaataatagatttatttcggtagatgaggactcctcaggaaaccaagaagaacaagaggaagatgaagaacatgctggtgaacaagatgaggaggatgaggaggaggaggagatggaccaggagagtgacgattttgatcagtctgatgatagtagcagagaagatgaacatacacatactaacagtgtcacgaactccagtagtattgtggacctgcccgttcaccaactctcctccccattctatacaaaaacaacaaaaatgaaaagaaagttggaccatggttctgaggtccgctctttttctttgggaaagaaaccatgcaaagtctcagaatatacaagtaccactgggcttgtaccatgttcagcaacaccaacaacttttggggacctcagagcagccaatggccaagggcaacaacgacgccgaattacatctgtccagccacctacaggcctccaggaatggctaaaaatgtttcagagctggagtggaccagagaaattgcttgctttagatgaactcattgatagttgtgaaccaacacaagtaaaacatatgatgcaagtgatagaaccccagtttcaacgagacttcatttcattgctccctaaagagttggcactctatgtgctttcattcctggaacccaaagacctgctacaagcagctcagacatgtcgctactggagaattttggctgaagacaaccttctctggagagagaaatgcaaagaagaggggattgatgaaccattgcacatcaagagaagaaaagtaataaaaccaggtttcatacacagtccatggaaaagtgcatacatcagacagcacagaattgatactaactcgaggcgaggaggcagcggcagcggcagccggccccccttcacctacgccacactgatcagatgggccatcctggaagccccagaaaaacagcgcacccttaacgagatctaccactggttcaccagaatgttcgcctttttccggaaccaccctgccacctggaagaacgccattcggcacaacctgtctctgcacaagtgcttcgtgcgggtcgagagcgagaagggagctgtgtggaccgtggacgagctggagttccggaagaagcggagccaaagaccaagcaggtaa

SEQ ID NO: 1485 - DNA, 1419 bp, synthetic construct
  source 1..1419: mol_type = other DNA; note = HA-FBXW7a-(GS)4-FOXP3DBD nucleic acid
atgtacccatacgatgttccagattacgctaatcaggaactgctctctgtgggcagcaaaagacgacgaactggaggctctctgagaggtaacccttcctcaagccaggtagatgaagaacagatgaatcgtgtggtagaggaggaacagcaacagcaactcagacaacaagaggaggagcacactgcaaggaatggtgaagttgttggagtagaacctagacctggaggccaaaatgattcccagcaaggacagttggaagaaaacaataatagatttatttcggtagatgaggactcctcaggaaaccaagaagaacaagaggaagatgaagaacatgctggtgaacaagatgaggaggatgaggaggaggaggagatggaccaggagagtgacgattttgatcagtctgatgatagtagcagagaagatgaacatacacatactaacagtgtcacgaactccagtagtattgtggacctgcccgttcaccaactctcctccccattctatacaaaaacaacaaaaatgaaaagaaagttggaccatggttctgaggtccgctctttttctttgggaaagaaaccatgcaaagtctcagaatatacaagtaccactgggcttgtaccatgttcagcaacaccaacaacttttggggacctcagagcagccaatggccaagggcaacaacgacgccgaattacatctgtccagccacctacaggcctccaggaatggctaaaaatgtttcagagctggagtggaccagagaaattgcttgctttagatgaactcattgatagttgtgaaccaacacaagtaaaacatatgatgcaagtgatagaaccccagtttcaacgagacttcatttcattgctccctaaagagttggcactctatgtgctttcattcctggaacccaaagacctgctacaagcagctcagacatgtcgctactggagaattttggctgaagacaaccttctctggagagagaaatgcaaagaagaggggattgatgaaccattgcacatcaagagaagaaaagtaataaaaccaggtttcatacacagtccatggaaaagtgcatacatcagacagcacagaattgatactaactcgaggcgaggaggcagcggcagcggcagcggcagccggccccccttcacctacgccacactgatcagatgggccatcctggaagccccagaaaaacagcgcacccttaacgagatctaccactggttcaccagaatgttcgcctttttccggaaccaccctgccacctggaagaacgccattcggcacaacctgtctctgcacaagtgcttcgtgcgggtcgagagcgagaagggagctgtgtggaccgtggacgagctggagttccggaagaagcggagccaaagaccaagcaggtaa

SEQ ID NO: 1486 - DNA, 1425 bp, synthetic construct
  source 1..1425: mol_type = other DNA; note = HA-FBXW7a-(GS)5-FOXP3DBD nucleic acid
atgtacccatacgatgttccagattacgctaatcaggaactgctctctgtgggcagcaaaagacgacgaactggaggctctctgagaggtaacccttcctcaagccaggtagatgaagaacagatgaatcgtgtggtagaggaggaacagcaacagcaactcagacaacaagaggaggagcacactgcaaggaatggtgaagttgttggagtagaacctagacctggaggccaaaatgattcccagcaaggacagttggaagaaaacaataatagatttatttcggtagatgaggactcctcaggaaaccaagaagaacaagaggaagatgaagaacatgctggtgaacaagatgaggaggatgaggaggaggaggagatggaccaggagagtgacgattttgatcagtctgatgatagtagcagagaagatgaacatacacatactaacagtgtcacgaactccagtagtattgtggacctgcccgttcaccaactctcctccccattctatacaaaaacaacaaaaatgaaaagaaagttggaccatggttctgaggtccgctctttttctttgggaaagaaaccatgcaaagtctcagaatatacaagtaccactgggcttgtaccatgttcagcaacaccaacaacttttggggacctcagagcagccaatggccaagggcaacaacgacgccgaattacatctgtccagccacctacaggcctccaggaatggctaaaaatgtttcagagctggagtggaccagagaaattgcttgctttagatgaactcattgatagttgtgaaccaacacaagtaaaacatatgatgcaagtgatagaaccccagtttcaacgagacttcatttcattgctccctaaagagttggcactctatgtgctttcattcctggaacccaaagacctgctacaagcagctcagacatgtcgctactggagaattttggctgaagacaaccttctctggagagagaaatgcaaagaagaggggattgatgaaccattgcacatcaagagaagaaaagtaataaaaccaggtttcatacacagtccatggaaaagtgcatacatcagacagcacagaattgatactaactcgaggcgaggaggcagcggcagcggcagcggcagcggcagccggccccccttcacctacgccacactgatcagatgggccatcctggaagccccagaaaaacagcgcacccttaacgagatctaccactggttcaccagaatgttcgcctttttccggaaccaccctgccacctggaagaacgccattcggcacaacctgtctctgcacaagtgcttcgtgcgggtcgagagcgagaagggagctgtgtggaccgtggacgagctggagttccggaagaagcggagccaaagaccaagcaggtaa

SEQ ID NO: 1487 - DNA, 1431 bp, synthetic construct
  source 1..1431: mol_type = other DNA; note = HA-FBXW7a-(GS)6-FOXP3DBD nucleic acid
atgtacccatacgatgttccagattacgctaatcaggaactgctctctgtgggcagcaaaagacgacgaactggaggctctctgagaggtaacccttcctcaagccaggtagatgaagaacagatgaatcgtgtggtagaggaggaacagcaacagcaactcagacaacaagaggaggagcacactgcaaggaatggtgaagttgttggagtagaacctagacctggaggccaaaatgattcccagcaaggacagttggaagaaaacaataatagatttatttcggtagatgaggactcctcaggaaaccaagaagaacaagaggaagatgaagaacatgctggtgaacaagatgaggaggatgaggaggaggaggagatggaccaggagagtgacgattttgatcagtctgatgatagtagcagagaagatgaacatacacatactaacagtgtcacgaactccagtagtattgtggacctgcccgttcaccaactctcctccccattctatacaaaaacaacaaaaatgaaaagaaagttggaccatggttctgaggtccgctctttttctttgggaaagaaaccatgcaaagtctcagaatatacaagtaccactgggcttgtaccatgttcagcaacaccaacaacttttggggacctcagagcagccaatggccaagggcaacaacgacgccgaattacatctgtccagccacctacaggcctccaggaatggctaaaaatgtttcagagctggagtggaccagagaaattgcttgctttagatgaactcattgatagttgtgaaccaacacaagtaaaacatatgatgcaagtgatagaaccccagtttcaacgagacttcatttcattgctccctaaagagttggcactctatgtgctttcattcctggaacccaaagacctgctacaagcagctcagacatgtcgctactggagaattttggctgaagacaaccttctctggagagagaaatgcaaagaagaggggattgatgaaccattgcacatcaagagaagaaaagtaataaaaccaggtttcatacacagtccatggaaaagtgcatacatcagacagcacagaattgatactaactcgaggcgaggaggcagcggcagcggcagcggcagcggcagcggcagccggccccccttcacctacgccacactgatcagatgggccatcctggaagccccagaaaaacagcgcacccttaacgagatctaccactggttcaccagaatgttcgcctttttccggaaccaccctgccacctggaagaacgccattcggcacaacctgtctctgcacaagtgcttcgtgcgggtcgagagcgagaagggagctgtgtggaccgtggacgagctggagttccggaagaagcggagccaaagaccaagcaggtaa

SEQ ID NO: 1488 - DNA, 1278 bp, synthetic construct
  source 1..1278: mol_type = other DNA; note = NLS-Keap1-(GS)1-FOXP3DBD nucleic acid
ccggcggcgaaacgcgtgaaactggatggcagcggcagcggcagccagccagatcccaggcctagcggggctggggcctgctgccgattcctgcccctgcagtcacagtgccctgagggggcaggggacgcggtgatgtacgcctccactgagtgcaaggcggaggtgacgccctcccagcatggcaaccgcaccttcagctacaccctggaggatcataccaagcaggcctttggcatcatgaacgagctgcggctcagccagcagctgtgtgacgtcacactgcaggtcaagtaccaggatgcaccggccgcccagttcatggcccacaaggtggtgctggcctcatccagccctgtcttcaaggccatgttcaccaacgggctgcgggagcagggcatggaggtggtgtccattgagggtatccaccccaaggtcatggagcgcctcattgaattcgcctacacggcctccatctccatgggcgagaagtgtgtcctccacgtcatgaacggtgctgtcatgtaccagatcgacagcgttgtccgtgcctgcagtgacttcctggtgcagcagctggaccccagcaatgccatcggcatcgccaacttcgctgagcagattggctgtgtggagttgcaccagcgtgcccgggagtacatctacatgcattttggggaggtggccaagcaagaggagttcttcaacctgtcccactgccaactggtgaccctcatcagccgggacgacctgaacgtgcgctgcgagtccgaggtcttccacgcctgcatcaactgggtcaagtacgactgcgaacagcgacggttctacgtccaggcgctgctgcgggccgtgcgctgccactcgttgacgccgaacttcctgcagatgcagctgcagaagtgcgagatcctgcagtccgactcccgctgcaaggactacctggtcaagatcttcgaggagctcaccctgcacaagcccacgcaggtgatgccctgccgggcgcccggcagccggccccccttcacctacgccacactgatcagatgggccatcctggaagccccagaaaaacagcgcacccttaacgagatctaccactggttcaccagaatgttcgcctttttccggaaccaccctgccacctggaagaacgccattcggcacaacctgtctctgcacaagtgcttcgtgcgggtcgagagcgagaagggagctgtgtggaccgtggacgagctggagttccggaagaagcggagccaaagaccaagcaggtaa

SEQ ID NO: 1489 - DNA, 1284 bp, synthetic construct
  source 1..1284: mol_type = other DNA; note = NLS-Keap1-(GS)2-FOXP3DBD nucleic acid
ccggcggcgaaacgcgtgaaactggatggcagcggcagcggcagccagccagatcccaggcctagcggggctggggcctgctgccgattcctgcccctgcagtcacagtgccctgagggggcaggggacgcggtgatgtacgcctccactgagtgcaaggcggaggtgacgccctcccagcatggcaaccgcaccttcagctacaccctggaggatcataccaagcaggcctttggcatcatgaacgagctgcggctcagccagcagctgtgtgacgtcacactgcaggtcaagtaccaggatgcaccggccgcccagttcatggcccacaaggtggtgctggcctcatccagccctgtcttcaaggccatgttcaccaacgggctgcgggagcagggcatggaggtggtgtccattgagggtatccaccccaaggtcatggagcgcctcattgaattcgcctacacggcctccatctccatgggcgagaagtgtgtcctccacgtcatgaacggtgctgtcatgtaccagatcgacagcgttgtccgtgcctgcagtgacttcctggtgcagcagctggaccccagcaatgccatcggcatcgccaacttcgctgagcagattggctgtgtggagttgcaccagcgtgcccgggagtacatctacatgcattttggggaggtggccaagcaagaggagttcttcaacctgtcccactgccaactggtgaccctcatcagccgggacgacctgaacgtgcgctgcgagtccgaggtcttccacgcctgcatcaactgggtcaagtacgactgcgaacagcgacggttctacgtccaggcgctgctgcgggccgtgcgctgccactcgttgacgccgaacttcctgcagatgcagctgcagaagtgcgagatcctgcagtccgactcccgctgcaaggactacctggtcaagatcttcgaggagctcaccctgcacaagcccacgcaggtgatgccctgccgggcgcccggcagcggcagccggccccccttcacctacgccacactgatcagatgggccatcctggaagccccagaaaaacagcgcacccttaacgagatctaccactggttcaccagaatgttcgcctttttccggaaccaccctgccacctggaagaacgccattcggcacaacctgtctctgcacaagtgcttcgtgcgggtcgagagcgagaagggagctgtgtggaccgtggacgagctggagttccggaagaagcggagccaaagaccaagcaggtaa

SEQ ID NO: 1490 - DNA, 1290 bp, synthetic construct
  source 1..1290: mol_type = other DNA; note = NLS-Keap1-(GS)3-FOXP3DBD nucleic acid
ccggcggcgaaacgcgtgaaactggatggcagcggcagcggcagccagccagatcccaggcctagcggggctggggcctgctgccgattcctgcccctgcagtcacagtgccctgagggggcaggggacgcggtgatgtacgcctccactgagtgcaaggcggaggtgacgccctcccagcatggcaaccgcaccttcagctacaccctggaggatcataccaagcaggcctttggcatcatgaacgagctgcggctcagccagcagctgtgtgacgtcacactgcaggtcaagtaccaggatgcaccggccgcccagttcatggcccacaaggtggtgctggcctcatccagccctgtcttcaaggccatgttcaccaacgggctgcgggagcagggcatggaggtggtgtccattgagggtatccaccccaaggtcatggagcgcctcattgaattcgcctacacggcctccatctccatgggcgagaagtgtgtcctccacgtcatgaacggtgctgtcatgtaccagatcgacagcgttgtccgtgcctgcagtgacttcctggtgcagcagctggaccccagcaatgccatcggcatcgccaacttcgctgagcagattggctgtgtggagttgcaccagcgtgcccgggagtacatctacatgcattttggggaggtggccaagcaagaggagttcttcaacctgtcccactgccaactggtgaccctcatcagccgggacgacctgaacgtgcgctgcgagtccgaggtcttccacgcctgcatcaactgggtcaagtacgactgcgaacagcgacggttctacgtccaggcgctgctgcgggccgtgcgctgccactcgttgacgccgaacttcctgcagatgcagctgcagaagtgcgagatcctgcagtccgactcccgctgcaaggactacctggtcaagatcttcgaggagctcaccctgcacaagcccacgcaggtgatgccctgccgggcgcccggcagcggcagcggcagccggccccccttcacctacgccacactgatcagatgggccatcctggaagccccagaaaaacagcgcacccttaacgagatctaccactggttcaccagaatgttcgcctttttccggaaccaccctgccacctggaagaacgccattcggcacaacctgtctctgcacaagtgcttcgtgcgggtcgagagcgagaagggagctgtgtggaccgtggacgagctggagttccggaagaagcggagccaaagaccaagcaggtaa

SEQ ID NO: 1491 - DNA, 1296 bp, synthetic construct
  source 1..1296: mol_type = other DNA; note = NLS-Keap1-(GS)4-FOXP3DBD nucleic acid
ccggcggcgaaacgcgtgaaactggatggcagcggcagcggcagccagccagatcccaggcctagcggggctggggcctgctgccgattcctgcccctgcagtcacagtgccctgagggggcaggggacgcggtgatgtacgcctccactgagtgcaaggcggaggtgacgccctcccagcatggcaaccgcaccttcagctacaccctggaggatcataccaagcaggcctttggcatcatgaacgagctgcggctcagccagcagctgtgtgacgtcacactgcaggtcaagtaccaggatgcaccggccgcccagttcatggcccacaaggtggtgctggcctcatccagccctgtcttcaaggccatgttcaccaacgggctgcgggagcagggcatggaggtggtgtccattgagggtatccaccccaaggtcatggagcgcctcattgaattcgcctacacggcctccatctccatgggcgagaagtgtgtcctccacgtcatgaacggtgctgtcatgtaccagatcgacagcgttgtccgtgcctgcagtgacttcctggtgcagcagctggaccccagcaatgccatcggcatcgccaacttcgctgagcagattggctgtgtggagttgcaccagcgtgcccgggagtacatctacatgcattttggggaggtggccaagcaagaggagttcttcaacctgtcccactgccaactggtgaccctcatcagccgggacgacctgaacgtgcgctgcgagtccgaggtcttccacgcctgcatcaactgggtcaagtacgactgcgaacagcgacggttctacgtccaggcgctgctgcgggccgtgcgctgccactcgttgacgccgaacttcctgcagatgcagctgcagaagtgcgagatcctgcagtccgactcccgctgcaaggactacctggtcaagatcttcgaggagctcaccctgcacaagcccacgcaggtgatgccctgccgggcgcccggcagcggcagcggcagcggcagccggccccccttcacctacgccacactgatcagatgggccatcctggaagccccagaaaaacagcgcacccttaacgagatctaccactggttcaccagaatgttcgcctttttccggaaccaccctgccacctggaagaacgccattcggcacaacctgtctctgcacaagtgcttcgtgcgggtcgagagcgagaagggagctgtgtggaccgtggacgagctggagttccggaagaagcggagccaaagaccaagcaggtaa

SEQ ID NO: 1492 - DNA, 1302 bp, synthetic construct
  source 1..1302: mol_type = other DNA; note = NLS-Keap1-(GS)5-FOXP3DBD nucleic acid
ccggcggcgaaacgcgtgaaactggatggcagcggcagcggcagccagccagatcccaggcctagcggggctggggcctgctgccgattcctgcccctgcagtcacagtgccctgagggggcaggggacgcggtgatgtacgcctccactgagtgcaaggcggaggtgacgccctcccagcatggcaaccgcaccttcagctacaccctggaggatcataccaagcaggcctttggcatcatgaacgagctgcggctcagccagcagctgtgtgacgtcacactgcaggtcaagtaccaggatgcaccggccgcccagttcatggcccacaaggtggtgctggcctcatccagccctgtcttcaaggccatgttcaccaacgggctgcgggagcagggcatggaggtggtgtccattgagggtatccaccccaaggtcatggagcgcctcattgaattcgcctacacggcctccatctccatgggcgagaagtgtgtcctccacgtcatgaacggtgctgtcatgtaccagatcgacagcgttgtccgtgcctgcagtgacttcctggtgcagcagctggaccccagcaatgccatcggcatcgccaacttcgctgagcagattggctgtgtggagttgcaccagcgtgcccgggagtacatctacatgcattttggggaggtggccaagcaagaggagttcttcaacctgtcccactgccaactggtgaccctcatcagccgggacgacctgaacgtgcgctgcgagtccgaggtcttccacgcctgcatcaactgggtcaagtacgactgcgaacagcgacggttctacgtccaggcgctgctgcgggccgtgcgctgccactcgttgacgccgaacttcctgcagatgcagctgcagaagtgcgagatcctgcagtccgactcccgctgcaaggactacctggtcaagatcttcgaggagctcaccctgcacaagcccacgcaggtgatgccctgccgggcgcccggcagcggcagcggcagcggcagcggcagccggccccccttcacctacgccacactgatcagatgggccatcctggaagccccagaaaaacagcgcacccttaacgagatctaccactggttcaccagaatgttcgcctttttccggaaccaccctgccacctggaagaacgccattcggcacaacctgtctctgcacaagtgcttcgtgcgggtcgagagcgagaagggagctgtgtggaccgtggacgagctggagttccggaagaagcggagccaaagaccaagcaggtaa

SEQ ID NO: 1493 - DNA, 1308 bp, synthetic construct
  source 1..1308: mol_type = other DNA; note = NLS-Keap1-(GS)6-FOXP3DBD nucleic acid
ccggcggcgaaacgcgtgaaactggatggcagcggcagcggcagccagccagatcccaggcctagcggggctggggcctgctgccgattcctgcccctgcagtcacagtgccctgagggggcaggggacgcggtgatgtacgcctccactgagtgcaaggcggaggtgacgccctcccagcatggcaaccgcaccttcagctacaccctggaggatcataccaagcaggcctttggcatcatgaacgagctgcggctcagccagcagctgtgtgacgtcacactgcaggtcaagtaccaggatgcaccggccgcccagttcatggcccacaaggtggtgctggcctcatccagccctgtcttcaaggccatgttcaccaacgggctgcgggagcagggcatggaggtggtgtccattgagggtatccaccccaaggtcatggagcgcctcattgaattcgcctacacggcctccatctccatgggcgagaagtgtgtcctccacgtcatgaacggtgctgtcatgtaccagatcgacagcgttgtccgtgcctgcagtgacttcctggtgcagcagctggaccccagcaatgccatcggcatcgccaacttcgctgagcagattggctgtgtggagttgcaccagcgtgcccgggagtacatctacatgcattttggggaggtggccaagcaagaggagttcttcaacctgtcccactgccaactggtgaccctcatcagccgggacgacctgaacgtgcgctgcgagtccgaggtcttccacgcctgcatcaactgggtcaagtacgactgcgaacagcgacggttctacgtccaggcgctgctgcgggccgtgcgctgccactcgttgacgccgaacttcctgcagatgcagctgcagaagtgcgagatcctgcagtccgactcccgctgcaaggactacctggtcaagatcttcgaggagctcaccctgcacaagcccacgcaggtgatgccctgccgggcgcccggcagcggcagcggcagcggcagcggcagcggcagccggccccccttcacctacgccacactgatcagatgggccatcctggaagccccagaaaaacagcgcacccttaacgagatctaccactggttcaccagaatgttcgcctttttccggaaccaccctgccacctggaagaacgccattcggcacaacctgtctctgcacaagtgcttcgtgcgggtcgagagcgagaagggagctgtgtggaccgtggacgagctggagttccggaagaagcggagccaaagaccaagcaggtaa

SEQ ID NO: 1494 - DNA, 1308 bp, synthetic construct
  source 1..1308: mol_type = other DNA; note = HA-NLS-Keap1-(GS)1-FOXP3DBD nucleic acid
atgtacccatacgatgttccagattacgctccggcggcgaaacgcgtgaaactggatggcagcggcagcggcagccagccagatcccaggcctagcggggctggggcctgctgccgattcctgcccctgcagtcacagtgccctgagggggcaggggacgcggtgatgtacgcctccactgagtgcaaggcggaggtgacgccctcccagcatggcaaccgcaccttcagctacaccctggaggatcataccaagcaggcctttggcatcatgaacgagctgcggctcagccagcagctgtgtgacgtcacactgcaggtcaagtaccaggatgcaccggccgcccagttcatggcccacaaggtggtgctggcctcatccagccctgtcttcaaggccatgttcaccaacgggctgcgggagcagggcatggaggtggtgtccattgagggtatccaccccaaggtcatggagcgcctcattgaattcgcctacacggcctccatctccatgggcgagaagtgtgtcctccacgtcatgaacggtgctgtcatgtaccagatcgacagcgttgtccgtgcctgcagtgacttcctggtgcagcagctggaccccagcaatgccatcggcatcgccaacttcgctgagcagattggctgtgtggagttgcaccagcgtgcccgggagtacatctacatgcattttggggaggtggccaagcaagaggagttcttcaacctgtcccactgccaactggtgaccctcatcagccgggacgacctgaacgtgcgctgcgagtccgaggtcttccacgcctgcatcaactgggtcaagtacgactgcgaacagcgacggttctacgtccaggcgctgctgcgggccgtgcgctgccactcgttgacgccgaacttcctgcagatgcagctgcagaagtgcgagatcctgcagtccgactcccgctgcaaggactacctggtcaagatcttcgaggagctcaccctgcacaagcccacgcaggtgatgccctgccgggcgcccggcagccggccccccttcacctacgccacactgatcagatgggccatcctggaagccccagaaaaacagcgcacccttaacgagatctaccactggttcaccagaatgttcgcctttttccggaaccaccctgccacctggaagaacgccattcggcacaacctgtctctgcacaagtgcttcgtgcgggtcgagagcgagaagggagctgtgtggaccgtggacgagctggagttccggaagaagcggagccaaagaccaagcaggtaa

SEQ ID NO: 1495 - DNA, 1314 bp, synthetic construct
  source 1..1314: mol_type = other DNA; note = HA-NLS-Keap1-(GS)2-FOXP3DBD nucleic acid
atgtacccatacgatgttccagattacgctccggcggcgaaacgcgtgaaactggatggcagcggcagcggcagccagccagatcccaggcctagcggggctggggcctgctgccgattcctgcccctgcagtcacagtgccctgagggggcaggggacgcggtgatgtacgcctccactgagtgcaaggcggaggtgacgccctcccagcatggcaaccgcaccttcagctacaccctggaggatcataccaagcaggcctttggcatcatgaacgagctgcggctcagccagcagctgtgtgacgtcacactgcaggtcaagtaccaggatgcaccggccgcccagttcatggcccacaaggtggtgctggcctcatccagccctgtcttcaaggccatgttcaccaacgggctgcgggagcagggcatggaggtggtgtccattgagggtatccaccccaaggtcatggagcgcctcattgaattcgcctacacggcctccatctccatgggcgagaagtgtgtcctccacgtcatgaacggtgctgtcatgtaccagatcgacagcgttgtccgtgcctgcagtgacttcctggtgcagcagctggaccccagcaatgccatcggcatcgccaacttcgctgagcagattggctgtgtggagttgcaccagcgtgcccgggagtacatctacatgcattttggggaggtggccaagcaagaggagttcttcaacctgtcccactgccaactggtgaccctcatcagccgggacgacctgaacgtgcgctgcgagtccgaggtcttccacgcctgcatcaactgggtcaagtacgactgcgaacagcgacggttctacgtccaggcgctgctgcgggccgtgcgctgccactcgttgacgccgaacttcctgcagatgcagctgcagaagtgcgagatcctgcagtccgactcccgctgcaaggactacctggtcaagatcttcgaggagctcaccctgcacaagcccacgcaggtgatgccctgccgggcgcccggcagcggcagccggccccccttcacctacgccacactgatcagatgggccatcctggaagccccagaaaaacagcgcacccttaacgagatctaccactggttcaccagaatgttcgcctttttccggaaccaccctgccacctggaagaacgccattcggcacaacctgtctctgcacaagtgcttcgtgcgggtcgagagcgagaagggagctgtgtggaccgtggacgagctggagttccggaagaagcggagccaaagaccaagcaggtaa

SEQ ID NO: 1496 - DNA, 1320 bp, synthetic construct
  source 1..1320: mol_type = other DNA; note = HA-NLS-Keap1-(GS)3-FOXP3DBD nucleic acid
atgtacccatacgatgttccagattacgctccggcggcgaaacgcgtgaaactggatggcagcggcagcggcagccagccagatcccaggcctagcggggctggggcctgctgccgattcctgcccctgcagtcacagtgccctgagggggcaggggacgcggtgatgtacgcctccactgagtgcaaggcggaggtgacgccctcccagcatggcaaccgcaccttcagctacaccctggaggatcataccaagcaggcctttggcatcatgaacgagctgcggctcagccagcagctgtgtgacgtcacactgcaggtcaagtaccaggatgcaccggccgcccagttcatggcccacaaggtggtgctggcctcatccagccctgtcttcaaggccatgttcaccaacgggctgcgggagcagggcatggaggtggtgtccattgagggtatccaccccaaggtcatggagcgcctcattgaattcgcctacacggcctccatctccatgggcgagaagtgtgtcctccacgtcatgaacggtgctgtcatgtaccagatcgacagcgttgtccgtgcctgcagtgacttcctggtgcagcagctggaccccagcaatgccatcggcatcgccaacttcgctgagcagattggctgtgtggagttgcaccagcgtgcccgggagtacatctacatgcattttggggaggtggccaagcaagaggagttcttcaacctgtcccactgccaactggtgaccctcatcagccgggacgacctgaacgtgcgctgcgagtccgaggtcttccacgcctgcatcaactgggtcaagtacgactgcgaacagcgacggttctacgtccaggcgctgctgcgggccgtgcgctgccactcgttgacgccgaacttcctgcagatgcagctgcagaagtgcgagatcctgcagtccgactcccgctgcaaggactacctggtcaagatcttcgaggagctcaccctgcacaagcccacgcaggtgatgccctgccgggcgcccggcagcggcagcggcagccggccccccttcacctacgccacactgatcagatgggccatcctggaagccccagaaaaacagcgcacccttaacgagatctaccactggttcaccagaatgttcgcctttttccggaaccaccctgccacctggaagaacgccattcggcacaacctgtctctgcacaagtgcttcgtgcgggtcgagagcgagaagggagctgtgtggaccgtggacgagctggagttccggaagaagcggagccaaagaccaagcaggtaa

SEQ ID NO: 1497 - DNA, 1326 bp, synthetic construct
  source 1..1326: mol_type = other DNA; note = HA-NLS-Keap1-(GS)4-FOXP3DBD nucleic acid
atgtacccatacgatgttccagattacgctccggcggcgaaacgcgtgaaactggatggcagcggcagcggcagccagccagatcccaggcctagcggggctggggcctgctgccgattcctgcccctgcagtcacagtgccctgagggggcaggggacgcggtgatgtacgcctccactgagtgcaaggcggaggtgacgccctcccagcatggcaaccgcaccttcagctacaccctggaggatcataccaagcaggcctttggcatcatgaacgagctgcggctcagccagcagctgtgtgacgtcacactgcaggtcaagtaccaggatgcaccggccgcccagttcatggcccacaaggtggtgctggcctcatccagccctgtcttcaaggccatgttcaccaacgggctgcgggagcagggcatggaggtggtgtccattgagggtatccaccccaaggtcatggagcgcctcattgaattcgcctacacggcctccatctccatgggcgagaagtgtgtcctccacgtcatgaacggtgctgtcatgtaccagatcgacagcgttgtccgtgcctgcagtgacttcctggtgcagcagctggaccccagcaatgccatcggcatcgccaacttcgctgagcagattggctgtgtggagttgcaccagcgtgcccgggagtacatctacatgcattttggggaggtggccaagcaagaggagttcttcaacctgtcccactgccaactggtgaccctcatcagccgggacgacctgaacgtgcgctgcgagtccgaggtcttccacgcctgcatcaactgggtcaagtacgactgcgaacagcgacggttctacgtccaggcgctgctgcgggccgtgcgctgccactcgttgacgccgaacttcctgcagatgcagctgcagaagtgcgagatcctgcagtccgactcccgctgcaaggactacctggtcaagatcttcgaggagctcaccctgcacaagcccacgcaggtgatgccctgccgggcgcccggcagcggcagcggcagcggcagccggccccccttcacctacgccacactgatcagatgggccatcctggaagccccagaaaaacagcgcacccttaacgagatctaccactggttcaccagaatgttcgcctttttccggaaccaccctgccacctggaagaacgccattcggcacaacctgtctctgcacaagtgcttcgtgcgggtcgagagcgagaagggagctgtgtggaccgtggacgagctggagttccggaagaagcggagccaaagaccaagcaggtaa

SEQ ID NO: 1498 - DNA, 1332 bp, synthetic construct
  source 1..1332: mol_type = other DNA; note = HA-NLS-Keap1-(GS)5-FOXP3DBD nucleic acid
atgtacccatacgatgttccagattacgctccggcggcgaaacgcgtgaaactggatggcagcggcagcggcagccagccagatcccaggcctagcggggctggggcctgctgccgattcctgcccctgcagtcacagtgccctgagggggcaggggacgcggtgatgtacgcctccactgagtgcaaggcggaggtgacgccctcccagcatggcaaccgcaccttcagctacaccctggaggatcataccaagcaggcctttggcatcatgaacgagctgcggctcagccagcagctgtgtgacgtcacactgcaggtcaagtaccaggatgcaccggccgcccagttcatggcccacaaggtggtgctggcctcatccagccctgtcttcaaggccatgttcaccaacgggctgcgggagcagggcatggaggtggtgtccattgagggtatccaccccaaggtcatggagcgcctcattgaattcgcctacacggcctccatctccatgggcgagaagtgtgtcctccacgtcatgaacggtgctgtcatgtaccagatcgacagcgttgtccgtgcctgcagtgacttcctggtgcagcagctggaccccagcaatgccatcggcatcgccaacttcgctgagcagattggctgtgtggagttgcaccagcgtgcccgggagtacatctacatgcattttggggaggtggccaagcaagaggagttcttcaacctgtcccactgccaactggtgaccctcatcagccgggacgacctgaacgtgcgctgcgagtccgaggtcttccacgcctgcatcaactgggtcaagtacgactgcgaacagcgacggttctacgtccaggcgctgctgcgggccgtgcgctgccactcgttgacgccgaacttcctgcagatgcagctgcagaagtgcgagatcctgcagtccgactcccgctgcaaggactacctggtcaagatcttcgaggagctcaccctgcacaagcccacgcaggtgatgccctgccgggcgcccggcagcggcagcggcagcggcagcggcagccggccccccttcacctacgccacactgatcagatgggccatcctggaagccccagaaaaacagcgcacccttaacgagatctaccactggttcaccagaatgttcgcctttttccggaaccaccctgccacctggaagaacgccattcggcacaacctgtctctgcacaagtgcttcgtgcgggtcgagagcgagaagggagctgtgtggaccgtggacgagctggagttccggaagaagcggagccaaagaccaagcaggtaa

SEQ ID NO: 1499 - DNA, 1338 bp, synthetic construct
  source 1..1338: mol_type = other DNA; note = HA-NLS-Keap1-(GS)6-FOXP3DBD nucleic acid
atgtacccatacgatgttccagattacgctccggcggcgaaacgcgtgaaactggatggcagcggcagcggcagccagccagatcccaggcctagcggggctggggcctgctgccgattcctgcccctgcagtcacagtgccctgagggggcaggggacgcggtgatgtacgcctccactgagtgcaaggcggaggtgacgccctcccagcatggcaaccgcaccttcagctacaccctggaggatcataccaagcaggcctttggcatcatgaacgagctgcggctcagccagcagctgtgtgacgtcacactgcaggtcaagtaccaggatgcaccggccgcccagttcatggcccacaaggtggtgctggcctcatccagccctgtcttcaaggccatgttcaccaacgggctgcgggagcagggcatggaggtggtgtccattgagggtatccaccccaaggtcatggagcgcctcattgaattcgcctacacggcctccatctccatgggcgagaagtgtgtcctccacgtcatgaacggtgctgtcatgtaccagatcgacagcgttgtccgtgcctgcagtgacttcctggtgcagcagctggaccccagcaatgccatcggcatcgccaacttcgctgagcagattggctgtgtggagttgcaccagcgtgcccgggagtacatctacatgcattttggggaggtggccaagcaagaggagttcttcaacctgtcccactgccaactggtgaccctcatcagccgggacgacctgaacgtgcgctgcgagtccgaggtcttccacgcctgcatcaactgggtcaagtacgactgcgaacagcgacggttctacgtccaggcgctgctgcgggccgtgcgctgccactcgttgacgccgaacttcctgcagatgcagctgcagaagtgcgagatcctgcagtccgactcccgctgcaaggactacctggtcaagatcttcgaggagctcaccctgcacaagcccacgcaggtgatgccctgccgggcgcccggcagcggcagcggcagcggcagcggcagcggcagccggccccccttcacctacgccacactgatcagatgggccatcctggaagccccagaaaaacagcgcacccttaacgagatctaccactggttcaccagaatgttcgcctttttccggaaccaccctgccacctggaagaacgccattcggcacaacctgtctctgcacaagtgcttcgtgcgggtcgagagcgagaagggagctgtgtggaccgtggacgagctggagttccggaagaagcggagccaaagaccaagcaggtaa

SEQ ID NO: 1500 - DNA, 696 bp, synthetic construct
  source 1..696: mol_type = other DNA; note = NLS-RNF125-(GS)1-FOXP3DBD nucleic acid
ccggcggcgaaacgcgtgaaactggatggcagcggcagcggcagcggctccgtgctgagcaccgacagcggcaaatcggcgcccgcctctgccaccgcgcgggccctggagcgcaggagggacccggagttgcccgtcacgtccttcgactgcgccgtgtgccttgaggtgttacaccagcctgtccggacccgctgcggccacgtattctgccgttcctgtattgctaccagtctgaagaacaacaagtggacctgtccttattgccgggcatatcttccttcagaaggagttccagcaactgatgtagccaaaagaatgaaatcagagtataagaactgcgctgagtgtgacaccctggtttgcctcagtgaaatgagggcacatattcggacttgtcagaagtacatagataagtatggaccaggcagccggccccccttcacctacgccacactgatcagatgggccatcctggaagccccagaaaaacagcgcacccttaacgagatctaccactggttcaccagaatgttcgcctttttccggaaccaccctgccacctggaagaacgccattcggcacaacctgtctctgcacaagtgcttcgtgcgggtcgagagcgagaagggagctgtgtggaccgtggacgagctggagttccggaagaagcggagccaaagaccaagcaggtaa

SEQ ID NO: 1501 - DNA, 702 bp, synthetic construct
  source 1..702: mol_type = other DNA; note = NLS-RNF125-(GS)2-FOXP3DBD nucleic acid
ccggcggcgaaacgcgtgaaactggatggcagcggcagcggcagcggctccgtgctgagcaccgacagcggcaaatcggcgcccgcctctgccaccgcgcgggccctggagcgcaggagggacccggagttgcccgtcacgtccttcgactgcgccgtgtgccttgaggtgttacaccagcctgtccggacccgctgcggccacgtattctgccgttcctgtattgctaccagtctgaagaacaacaagtggacctgtccttattgccgggcatatcttccttcagaaggagttccagcaactgatgtagccaaaagaatgaaatcagagtataagaactgcgctgagtgtgacaccctggtttgcctcagtgaaatgagggcacatattcggacttgtcagaagtacatagataagtatggaccaggcagcggcagccggccccccttcacctacgccacactgatcagatgggccatcctggaagccccagaaaaacagcgcacccttaacgagatctaccactggttcaccagaatgttcgcctttttccggaaccaccctgccacctggaagaacgccattcggcacaacctgtctctgcacaagtgcttcgtgcgggtcgagagcgagaagggagctgtgtggaccgtggacgagctggagttccggaagaagcggagccaaagaccaagcaggtaa

SEQ ID NO: 1502 - DNA, 708 bp, synthetic construct
  source 1..708: mol_type = other DNA; note = NLS-RNF125-(GS)3-FOXP3DBD nucleic acid
ccggcggcgaaacgcgtgaaactggatggcagcggcagcggcagcggctccgtgctgagcaccgacagcggcaaatcggcgcccgcctctgccaccgcgcgggccctggagcgcaggagggacccggagttgcccgtcacgtccttcgactgcgccgtgtgccttgaggtgttacaccagcctgtccggacccgctgcggccacgtattctgccgttcctgtattgctaccagtctgaagaacaacaagtggacctgtccttattgccgggcatatcttccttcagaaggagttccagcaactgatgtagccaaaagaatgaaatcagagtataagaactgcgctgagtgtgacaccctggtttgcctcagtgaaatgagggcacatattcggacttgtcagaagtacatagataagtatggaccaggcagcggcagcggcagccggccccccttcacctacgccacactgatcagatgggccatcctggaagccccagaaaaacagcgcacccttaacgagatctaccactggttcaccagaatgttcgcctttttccggaaccaccctgccacctggaagaacgccattcggcacaacctgtctctgcacaagtgcttcgtgcgggtcgagagcgagaagggagctgtgtggaccgtggacgagctggagttccggaagaagcggagccaaagaccaagcaggtaa

SEQ ID NO: 1503 - DNA, 714 bp, synthetic construct
  source 1..714: mol_type = other DNA; note = NLS-RNF125-(GS)4-FOXP3DBD nucleic acid
ccggcggcgaaacgcgtgaaactggatggcagcggcagcggcagcggctccgtgctgagcaccgacagcggcaaatcggcgcccgcctctgccaccgcgcgggccctggagcgcaggagggacccggagttgcccgtcacgtccttcgactgcgccgtgtgccttgaggtgttacaccagcctgtccggacccgctgcggccacgtattctgccgttcctgtattgctaccagtctgaagaacaacaagtggacctgtccttattgccgggcatatcttccttcagaaggagttccagcaactgatgtagccaaaagaatgaaatcagagtataagaactgcgctgagtgtgacaccctggtttgcctcagtgaaatgagggcacatattcggacttgtcagaagtacatagataagtatggaccaggcagcggcagcggcagcggcagccggccccccttcacctacgccacactgatcagatgggccatcctggaagccccagaaaaacagcgcacccttaacgagatctaccactggttcaccagaatgttcgcctttttccggaaccaccctgccacctggaagaacgccattcggcacaacctgtctctgcacaagtgcttcgtgcgggtcgagagcgagaagggagctgtgtggaccgtggacgagctggagttccggaagaagcggagccaaagaccaagcaggtaa

SEQ ID NO: 1504 - DNA, 720 bp, synthetic construct
  source 1..720: mol_type = other DNA; note = NLS-RNF125-(GS)5-FOXP3DBD nucleic acid
ccggcggcgaaacgcgtgaaactggatggcagcggcagcggcagcggctccgtgctgagcaccgacagcggcaaatcggcgcccgcctctgccaccgcgcgggccctggagcgcaggagggacccggagttgcccgtcacgtccttcgactgcgccgtgtgccttgaggtgttacaccagcctgtccggacccgctgcggccacgtattctgccgttcctgtattgctaccagtctgaagaacaacaagtggacctgtccttattgccgggcatatcttccttcagaaggagttccagcaactgatgtagccaaaagaatgaaatcagagtataagaactgcgctgagtgtgacaccctggtttgcctcagtgaaatgagggcacatattcggacttgtcagaagtacatagataagtatggaccaggcagcggcagcggcagcggcagcggcagccggccccccttcacctacgccacactgatcagatgggccatcctggaagccccagaaaaacagcgcacccttaacgagatctaccactggttcaccagaatgttcgcctttttccggaaccaccctgccacctggaagaacgccattcggcacaacctgtctctgcacaagtgcttcgtgcgggtcgagagcgagaagggagctgtgtggaccgtggacgagctggagttccggaagaagcggagccaaagaccaagcaggtaa

SEQ ID NO: 1505 - DNA, 726 bp, synthetic construct
  source 1..726: mol_type = other DNA; note = NLS-RNF125-(GS)6-FOXP3DBD nucleic acid
ccggcggcgaaacgcgtgaaactggatggcagcggcagcggcagcggctccgtgctgagcaccgacagcggcaaatcggcgcccgcctctgccaccgcgcgggccctggagcgcaggagggacccggagttgcccgtcacgtccttcgactgcgccgtgtgccttgaggtgttacaccagcctgtccggacccgctgcggccacgtattctgccgttcctgtattgctaccagtctgaagaacaacaagtggacctgtccttattgccgggcatatcttccttcagaaggagttccagcaactgatgtagccaaaagaatgaaatcagagtataagaactgcgctgagtgtgacaccctggtttgcctcagtgaaatgagggcacatattcggacttgtcagaagtacatagataagtatggaccaggcagcggcagcggcagcggcagcggcagcggcagccggccccccttcacctacgccacactgatcagatgggccatcctggaagccccagaaaaacagcgcacccttaacgagatctaccactggttcaccagaatgttcgcctttttccggaaccaccctgccacctggaagaacgccattcggcacaacctgtctctgcacaagtgcttcgtgcgggtcgagagcgagaagggagctgtgtggaccgtggacgagctggagttccggaagaagcggagccaaagaccaagcaggtaa

SEQ ID NO: 1506 - DNA, 726 bp, synthetic construct
  source 1..726: mol_type = other DNA; note = HA-NLS-RNF125-(GS)1-FOXP3DBD nucleic acid
atgtacccatacgatgttccagattacgctccggcggcgaaacgcgtgaaactggatggcagcggcagcggcagcggctccgtgctgagcaccgacagcggcaaatcggcgcccgcctctgccaccgcgcgggccctggagcgcaggagggacccggagttgcccgtcacgtccttcgactgcgccgtgtgccttgaggtgttacaccagcctgtccggacccgctgcggccacgtattctgccgttcctgtattgctaccagtctgaagaacaacaagtggacctgtccttattgccgggcatatcttccttcagaaggagttccagcaactgatgtagccaaaagaatgaaatcagagtataagaactgcgctgagtgtgacaccctggtttgcctcagtgaaatgagggcacatattcggacttgtcagaagtacatagataagtatggaccaggcagccggccccccttcacctacgccacactgatcagatgggccatcctggaagccccagaaaaacagcgcacccttaacgagatctaccactggttcaccagaatgttcgcctttttccggaaccaccctgccacctggaagaacgccattcggcacaacctgtctctgcacaagtgcttcgtgcgggtcgagagcgagaagggagctgtgtggaccgtggacgagctggagttccggaagaagcggagccaaagaccaagcaggtaa

SEQ ID NO: 1507 - DNA, 732 bp, synthetic construct
  source 1..732: mol_type = other DNA; note = HA-NLS-RNF125-(GS)2-FOXP3DBD nucleic acid
atgtacccatacgatgttccagattacgctccggcggcgaaacgcgtgaaactggatggcagcggcagcggcagcggctccgtgctgagcaccgacagcggcaaatcggcgcccgcctctgccaccgcgcgggccctggagcgcaggagggacccggagttgcccgtcacgtccttcgactgcgccgtgtgccttgaggtgttacaccagcctgtccggacccgctgcggccacgtattctgccgttcctgtattgctaccagtctgaagaacaacaagtggacctgtccttattgccgggcatatcttccttcagaaggagttccagcaactgatgtagccaaaagaatgaaatcagagtataagaactgcgctgagtgtgacaccctggtttgcctcagtgaaatgagggcacatattcggacttgtcagaagtacatagataagtatggaccaggcagcggcagccggccccccttcacctacgccacactgatcagatgggccatcctggaagccccagaaaaacagcgcacccttaacgagatctaccactggttcaccagaatgttcgcctttttccggaaccaccctgccacctggaagaacgccattcggcacaacctgtctctgcacaagtgcttcgtgcgggtcgagagcgagaagggagctgtgtggaccgtggacgagctggagttccggaagaagcggagccaaagaccaagcaggtaa

SEQ ID NO: 1508 - DNA, 738 bp, synthetic construct
  source 1..738: mol_type = other DNA; note = HA-NLS-RNF125-(GS)3-FOXP3DBD nucleic acid
atgtacccatacgatgttccagattacgctccggcggcgaaacgcgtgaaactggatggcagcggcagcggcagcggctccgtgctgagcaccgacagcggcaaatcggcgcccgcctctgccaccgcgcgggccctggagcgcaggagggacccggagttgcccgtcacgtccttcgactgcgccgtgtgccttgaggtgttacaccagcctgtccggacccgctgcggccacgtattctgccgttcctgtattgctaccagtctgaagaacaacaagtggacctgtccttattgccgggcatatcttccttcagaaggagttccagcaactgatgtagccaaaagaatgaaatcagagtataagaactgcgctgagtgtgacaccctggtttgcctcagtgaaatgagggcacatattcggacttgtcagaagtacatagataagtatggaccaggcagcggcagcggcagccggccccccttcacctacgccacactgatcagatgggccatcctggaagccccagaaaaacagcgcacccttaacgagatctaccactggttcaccagaatgttcgcctttttccggaaccaccctgccacctggaagaacgccattcggcacaacctgtctctgcacaagtgcttcgtgcgggtcgagagcgagaagggagctgtgtggaccgtggacgagctggagttccggaagaagcggagccaaagaccaagcaggtaa

SEQ ID NO: 1509 - DNA, 744 bp, synthetic construct
  source 1..744: mol_type = other DNA; note = HA-NLS-RNF125-(GS)4-FOXP3DBD nucleic acid
atgtacccatacgatgttccagattacgctccggcggcgaaacgcgtgaaactggatggcagcggcagcggcagcggctccgtgctgagcaccgacagcggcaaatcggcgcccgcctctgccaccgcgcgggccctggagcgcaggagggacccggagttgcccgtcacgtccttcgactgcgccgtgtgccttgaggtgttacaccagcctgtccggacccgctgcggccacgtattctgccgttcctgtattgctaccagtctgaagaacaacaagtggacctgtccttattgccgggcatatcttccttcagaaggagttccagcaactgatgtagccaaaagaatgaaatcagagtataagaactgcgctgagtgtgacaccctggtttgcctcagtgaaatgagggcacatattcggacttgtcagaagtacatagataagtatggaccaggcagcggcagcggcagcggcagccggccccccttcacctacgccacactgatcagatgggccatcctggaagccccagaaaaacagcgcacccttaacgagatctaccactggttcaccagaatgttcgcctttttccggaaccaccctgccacctggaagaacgccattcggcacaacctgtctctgcacaagtgcttcgtgcgggtcgagagcgagaagggagctgtgtggaccgtggacgagctggagttccggaagaagcggagccaaagaccaagcaggtaa

SEQ ID NO: 1510 - DNA, 750 bp, synthetic construct
  source 1..750: mol_type = other DNA; note = HA-NLS-RNF125-(GS)5-FOXP3DBD nucleic acid
atgtacccatacgatgttccagattacgctccggcggcgaaacgcgtgaaactggatggcagcggcagcggcagcggctccgtgctgagcaccgacagcggcaaatcggcgcccgcctctgccaccgcgcgggccctggagcgcaggagggacccggagttgcccgtcacgtccttcgactgcgccgtgtgccttgaggtgttacaccagcctgtccggacccgctgcggccacgtattctgccgttcctgtattgctaccagtctgaagaacaacaagtggacctgtccttattgccgggcatatcttccttcagaaggagttccagcaactgatgtagccaaaagaatgaaatcagagtataagaactgcgctgagtgtgacaccctggtttgcctcagtgaaatgagggcacatattcggacttgtcagaagtacatagataagtatggaccaggcagcggcagcggcagcggcagcggcagccggccccccttcacctacgccacactgatcagatgggccatcctggaagccccagaaaaacagcgcacccttaacgagatctaccactggttcaccagaatgttcgcctttttccggaaccaccctgccacctggaagaacgccattcggcacaacctgtctctgcacaagtgcttcgtgcgggtcgagagcgagaagggagctgtgtggaccgtggacgagctggagttccggaagaagcggagccaaagaccaagcaggtaa

SEQ ID NO: 1511 - DNA, 756 bp, synthetic construct
  source 1..756: mol_type = other DNA; note = HA-NLS-RNF125-(GS)6-FOXP3DBD nucleic acid
atgtacccatacgatgttccagattacgctccggcggcgaaacgcgtgaaactggatggcagcggcagcggcagcggctccgtgctgagcaccgacagcggcaaatcggcgcccgcctctgccaccgcgcgggccctggagcgcaggagggacccggagttgcccgtcacgtccttcgactgcgccgtgtgccttgaggtgttacaccagcctgtccggacccgctgcggccacgtattctgccgttcctgtattgctaccagtctgaagaacaacaagtggacctgtccttattgccgggcatatcttccttcagaaggagttccagcaactgatgtagccaaaagaatgaaatcagagtataagaactgcgctgagtgtgacaccctggtttgcctcagtgaaatgagggcacatattcggacttgtcagaagtacatagataagtatggaccaggcagcggcagcggcagcggcagcggcagcggcagccggccccccttcacctacgccacactgatcagatgggccatcctggaagccccagaaaaacagcgcacccttaacgagatctaccactggttcaccagaatgttcgcctttttccggaaccaccctgccacctggaagaacgccattcggcacaacctgtctctgcacaagtgcttcgtgcgggtcgagagcgagaagggagctgtgtggaccgtggacgagctggagttccggaagaagcggagccaaagaccaagcaggtaa

SEQ ID NO: 1512 - DNA, 993 bp, synthetic construct
  source 1..993: mol_type = other DNA; note = FOXP3DBD-(GS)1-SPOP-NLS nucleic acid
atgcggccccccttcacctacgccacactgatcagatgggccatcctggaagccccagaaaaacagcgcacccttaacgagatctaccactggttcaccagaatgttcgcctttttccggaaccaccctgccacctggaagaacgccattcggcacaacctgtctctgcacaagtgcttcgtgcgggtcgagagcgagaagggagctgtgtggaccgtggacgagctggagttccggaagaagcggagccaaagaccaagcaggggcagcaacgggcttctccctgatgacaagcttaccctcttctgcgaggtgagtgttgtgcaagattctgtcaacatttctggccagaataccatgaacatggtaaaggttcctgagtgccggctggcagatgagttaggaggactgtgggagaattcccggttcacagactgctgcttgtgtgttgccggccaggaattccaggctcacaaggctatcttagcagctcgttctccggtttttagtgccatgtttgaacatgaaatggaggagagcaaaaagaatcgagttgaaatcaatgatgtggagcctgaagtttttaaggaaatgatgtgcttcatttacacggggaaggctccaaacctcgacaaaatggctgatgatttgctggcagctgctgacaagtatgccctggagcgcttaaaggtcatgtgtgaggatgccctctgcagtaacctgtccgtggagaacgctgcagaaattctcatcctggccgacctccacagtgcagatcagttgaaaactcaggcagtggatttcatcaactatcatgcttcggatgtcttggagacctctgggtggaagtcaatggtggtgtcacatccccacttggtggctgaggcataccgctctctggcttcagcacagtgcccttttctgggacccccacgcaaacgcctgaagcaatccggcagcggcagcccggcggcgaaacgcgtgaaactggat

SEQ ID NO: 1513 - DNA, 999 bp, synthetic construct
  source 1..999: mol_type = other DNA; note = FOXP3DBD-(GS)2-SPOP-NLS nucleic acid
atgcggccccccttcacctacgccacactgatcagatgggccatcctggaagccccagaaaaacagcgcacccttaacgagatctaccactggttcaccagaatgttcgcctttttccggaaccaccctgccacctggaagaacgccattcggcacaacctgtctctgcacaagtgcttcgtgcgggtcgagagcgagaagggagctgtgtggaccgtggacgagctggagttccggaagaagcggagccaaagaccaagcaggggcagcggcagcaacgggcttctccctgatgacaagcttaccctcttctgcgaggtgagtgttgtgcaagattctgtcaacatttctggccagaataccatgaacatggtaaaggttcctgagtgccggctggcagatgagttaggaggactgtgggagaattcccggttcacagactgctgcttgtgtgttgccggccaggaattccaggctcacaaggctatcttagcagctcgttctccggtttttagtgccatgtttgaacatgaaatggaggagagcaaaaagaatcgagttgaaatcaatgatgtggagcctgaagtttttaaggaaatgatgtgcttcatttacacggggaaggctccaaacctcgacaaaatggctgatgatttgctggcagctgctgacaagtatgccctggagcgcttaaaggtcatgtgtgaggatgccctctgcagtaacctgtccgtggagaacgctgcagaaattctcatcctggccgacctccacagtgcagatcagttgaaaactcaggcagtggatttcatcaactatcatgcttcggatgtcttggagacctctgggtggaagtcaatggtggtgtcacatccccacttggtggctgaggcataccgctctctggcttcagcacagtgcccttttctgggacccccacgcaaacgcctgaagcaatccggcagcggcagcccggcggcgaaacgcgtgaaactggat

SEQ ID NO: 1514 - DNA, 1005 bp, synthetic construct
  source 1..1005: mol_type = other DNA; note = FOXP3DBD-(GS)3-SPOP-NLS nucleic acid
atgcggccccccttcacctacgccacactgatcagatgggccatcctggaagccccagaaaaacagcgcacccttaacgagatctaccactggttcaccagaatgttcgcctttttccggaaccaccctgccacctggaagaacgccattcggcacaacctgtctctgcacaagtgcttcgtgcgggtcgagagcgagaagggagctgtgtggaccgtggacgagctggagttccggaagaagcggagccaaagaccaagcaggggcagcggcagcggcagcaacgggcttctccctgatgacaagcttaccctcttctgcgaggtgagtgttgtgcaagattctgtcaacatttctggccagaataccatgaacatggtaaaggttcctgagtgccggctggcagatgagttaggaggactgtgggagaattcccggttcacagactgctgcttgtgtgttgccggccaggaattccaggctcacaaggctatcttagcagctcgttctccggtttttagtgccatgtttgaacatgaaatggaggagagcaaaaagaatcgagttgaaatcaatgatgtggagcctgaagtttttaaggaaatgatgtgcttcatttacacggggaaggctccaaacctcgacaaaatggctgatgatttgctggcagctgctgacaagtatgccctggagcgcttaaaggtcatgtgtgaggatgccctctgcagtaacctgtccgtggagaacgctgcagaaattctcatcctggccgacctccacagtgcagatcagttgaaaactcaggcagtggatttcatcaactatcatgcttcggatgtcttggagacctctgggtggaagtcaatggtggtgtcacatccccacttggtggctgaggcataccgctctctggcttcagcacagtgcccttttctgggacccccacgcaaacgcctgaagcaatccggcagcggcagcccggcggcgaaacgcgtgaaactggat

SEQ ID NO: 1515 - DNA, 1011 bp, synthetic construct
  source 1..1011: mol_type = other DNA; note = FOXP3DBD-(GS)4-SPOP-NLS nucleic acid
atgcggccccccttcacctacgccacactgatcagatgggccatcctggaagccccagaaaaacagcgcacccttaacgagatctaccactggttcaccagaatgttcgcctttttccggaaccaccctgccacctggaagaacgccattcggcacaacctgtctctgcacaagtgcttcgtgcgggtcgagagcgagaagggagctgtgtggaccgtggacgagctggagttccggaagaagcggagccaaagaccaagcaggggcagcggcagcggcagcggcagcaacgggcttctccctgatgacaagcttaccctcttctgcgaggtgagtgttgtgcaagattctgtcaacatttctggccagaataccatgaacatggtaaaggttcctgagtgccggctggcagatgagttaggaggactgtgggagaattcccggttcacagactgctgcttgtgtgttgccggccaggaattccaggctcacaaggctatcttagcagctcgttctccggtttttagtgccatgtttgaacatgaaatggaggagagcaaaaagaatcgagttgaaatcaatgatgtggagcctgaagtttttaaggaaatgatgtgcttcatttacacggggaaggctccaaacctcgacaaaatggctgatgatttgctggcagctgctgacaagtatgccctggagcgcttaaaggtcatgtgtgaggatgccctctgcagtaacctgtccgtggagaacgctgcagaaattctcatcctggccgacctccacagtgcagatcagttgaaaactcaggcagtggatttcatcaactatcatgcttcggatgtcttggagacctctgggtggaagtcaatggtggtgtcacatccccacttggtggctgaggcataccgctctctggcttcagcacagtgcccttttctgggacccccacgcaaacgcctgaagcaatccggcagcggcagcccggcggcgaaacgcgtgaaactggat

SEQ ID NO: 1516 - DNA, 1017 bp, synthetic construct
  source 1..1017: mol_type = other DNA; note = FOXP3DBD-(GS)5-SPOP-NLS nucleic acid
atgcggccccccttcacctacgccacactgatcagatgggccatcctggaagccccagaaaaacagcgcacccttaacgagatctaccactggttcaccagaatgttcgcctttttccggaaccaccctgccacctggaagaacgccattcggcacaacctgtctctgcacaagtgcttcgtgcgggtcgagagcgagaagggagctgtgtggaccgtggacgagctggagttccggaagaagcggagccaaagaccaagcaggggcagcggcagcggcagcggcagcggcagcaacgggcttctccctgatgacaagcttaccctcttctgcgaggtgagtgttgtgcaagattctgtcaacatttctggccagaataccatgaacatggtaaaggttcctgagtgccggctggcagatgagttaggaggactgtgggagaattcccggttcacagactgctgcttgtgtgttgccggccaggaattccaggctcacaaggctatcttagcagctcgttctccggtttttagtgccatgtttgaacatgaaatggaggagagcaaaaagaatcgagttgaaatcaatgatgtggagcctgaagtttttaaggaaatgatgtgcttcatttacacggggaaggctccaaacctcgacaaaatggctgatgatttgctggcagctgctgacaagtatgccctggagcgcttaaaggtcatgtgtgaggatgccctctgcagtaacctgtccgtggagaacgctgcagaaattctcatcctggccgacctccacagtgcagatcagttgaaaactcaggcagtggatttcatcaactatcatgcttcggatgtcttggagacctctgggtggaagtcaatggtggtgtcacatccccacttggtggctgaggcataccgctctctggcttcagcacagtgcccttttctgggacccccacgcaaacgcctgaagcaatccggcagcggcagcccggcggcgaaacgcgtgaaactggat

SEQ ID NO: 1517 - DNA, 1023 bp, synthetic construct
  source 1..1023: mol_type = other DNA; note = FOXP3DBD-(GS)6-SPOP-NLS nucleic acid
atgcggccccccttcacctacgccacactgatcagatgggccatcctggaagccccagaaaaacagcgcacccttaacgagatctaccactggttcaccagaatgttcgcctttttccggaaccaccctgccacctggaagaacgccattcggcacaacctgtctctgcacaagtgcttcgtgcgggtcgagagcgagaagggagctgtgtggaccgtggacgagctggagttccggaagaagcggagccaaagaccaagcaggggcagcggcagcggcagcggcagcggcagcggcagcaacgggcttctccctgatgacaagcttaccctcttctgcgaggtgagtgttgtgcaagattctgtcaacatttctggccagaataccatgaacatggtaaaggttcctgagtgccggctggcagatgagttaggaggactgtgggagaattcccggttcacagactgctgcttgtgtgttgccggccaggaattccaggctcacaaggctatcttagcagctcgttctccggtttttagtgccatgtttgaacatgaaatggaggagagcaaaaagaatcgagttgaaatcaatgatgtggagcctgaagtttttaaggaaatgatgtgcttcatttacacggggaaggctccaaacctcgacaaaatggctgatgatttgctggcagctgctgacaagtatgccctggagcgcttaaaggtcatgtgtgaggatgccctctgcagtaacctgtccgtggagaacgctgcagaaattctcatcctggccgacctccacagtgcagatcagttgaaaactcaggcagtggatttcatcaactatcatgcttcggatgtcttggagacctctgggtggaagtcaatggtggtgtcacatccccacttggtggctgaggcataccgctctctggcttcagcacagtgcccttttctgggacccccacgcaaacgcctgaagcaatccggcagcggcagcccggcggcgaaacgcgtgaaactggat

SEQ ID NO: 1518 - DNA, 1023 bp, synthetic construct
  source 1..1023: mol_type = other DNA; note = FOXP3DBD-(GS)1-SPOP-NLS-HA nucleic acid
atgcggccccccttcacctacgccacactgatcagatgggccatcctggaagccccagaaaaacagcgcacccttaacgagatctaccactggttcaccagaatgttcgcctttttccggaaccaccctgccacctggaagaacgccattcggcacaacctgtctctgcacaagtgcttcgtgcgggtcgagagcgagaagggagctgtgtggaccgtggacgagctggagttccggaagaagcggagccaaagaccaagcaggggcagcaacgggcttctccctgatgacaagcttaccctcttctgcgaggtgagtgttgtgcaagattctgtcaacatttctggccagaataccatgaacatggtaaaggttcctgagtgccggctggcagatgagttaggaggactgtgggagaattcccggttcacagactgctgcttgtgtgttgccggccaggaattccaggctcacaaggctatcttagcagctcgttctccggtttttagtgccatgtttgaacatgaaatggaggagagcaaaaagaatcgagttgaaatcaatgatgtggagcctgaagtttttaaggaaatgatgtgcttcatttacacggggaaggctccaaacctcgacaaaatggctgatgatttgctggcagctgctgacaagtatgccctggagcgcttaaaggtcatgtgtgaggatgccctctgcagtaacctgtccgtggagaacgctgcagaaattctcatcctggccgacctccacagtgcagatcagttgaaaactcaggcagtggatttcatcaactatcatgcttcggatgtcttggagacctctgggtggaagtcaatggtggtgtcacatccccacttggtggctgaggcataccgctctctggcttcagcacagtgcccttttctgggacccccacgcaaacgcctgaagcaatccggcagcggcagcccggcggcgaaacgcgtgaaactggattacccatacgatgttccagattacgcttaa

SEQ ID NO: 1519 - DNA, 1029 bp, synthetic construct
  source 1..1029: mol_type = other DNA; note = FOXP3DBD-(GS)2-SPOP-NLS-HA nucleic acid
atgcggccccccttcacctacgccacactgatcagatgggccatcctggaagccccagaaaaacagcgcacccttaacgagatctaccactggttcaccagaatgttcgcctttttccggaaccaccctgccacctggaagaacgccattcggcacaacctgtctctgcacaagtgcttcgtgcgggtcgagagcgagaagggagctgtgtggaccgtggacgagctggagttccggaagaagcggagccaaagaccaagcaggggcagcggcagcaacgggcttctccctgatgacaagcttaccctcttctgcgaggtgagtgttgtgcaagattctgtcaacatttctggccagaataccatgaacatggtaaaggttcctgagtgccggctggcagatgagttaggaggactgtgggagaattcccggttcacagactgctgcttgtgtgttgccggccaggaattccaggctcacaaggctatcttagcagctcgttctccggtttttagtgccatgtttgaacatgaaatggaggagagcaaaaagaatcgagttgaaatcaatgatgtggagcctgaagtttttaaggaaatgatgtgcttcatttacacggggaaggctccaaacctcgacaaaatggctgatgatttgctggcagctgctgacaagtatgccctggagcgcttaaaggtcatgtgtgaggatgccctctgcagtaacctgtccgtggagaacgctgcagaaattctcatcctggccgacctccacagtgcagatcagttgaaaactcaggcagtggatttcatcaactatcatgcttcggatgtcttggagacctctgggtggaagtcaatggtggtgtcacatccccacttggtggctgaggcataccgctctctggcttcagcacagtgcccttttctgggacccccacgcaaacgcctgaagcaatccggcagcggcagcccggcggcgaaacgcgtgaaactggattacccatacgatgttccagattacgcttaa

SEQ ID NO: 1520 - DNA, 1035 bp, synthetic construct
  source 1..1035: mol_type = other DNA; note = FOXP3DBD-(GS)3-SPOP-NLS-HA nucleic acid
atgcggccccccttcacctacgccacactgatcagatgggccatcctggaagccccagaaaaacagcgcacccttaacgagatctaccactggttcaccagaatgttcgcctttttccggaaccaccctgccacctggaagaacgccattcggcacaacctgtctctgcacaagtgcttcgtgcgggtcgagagcgagaagggagctgtgtggaccgtggacgagctggagttccggaagaagcggagccaaagaccaagcaggggcagcggcagcggcagcaacgggcttctccctgatgacaagcttaccctcttctgcgaggtgagtgttgtgcaagattctgtcaacatttctggccagaataccatgaacatggtaaaggttcctgagtgccggctggcagatgagttaggaggactgtgggagaattcccggttcacagactgctgcttgtgtgttgccggccaggaattccaggctcacaaggctatcttagcagctcgttctccggtttttagtgccatgtttgaacatgaaatggaggagagcaaaaagaatcgagttgaaatcaatgatgtggagcctgaagtttttaaggaaatgatgtgcttcatttacacggggaaggctccaaacctcgacaaaatggctgatgatttgctggcagctgctgacaagtatgccctggagcgcttaaaggtcatgtgtgaggatgccctctgcagtaacctgtccgtggagaacgctgcagaaattctcatcctggccgacctccacagtgcagatcagttgaaaactcaggcagtggatttcatcaactatcatgcttcggatgtcttggagacctctgggtggaagtcaatggtggtgtcacatccccacttggtggctgaggcataccgctctctggcttcagcacagtgcccttttctgggacccccacgcaaacgcctgaagcaatccggcagcggcagcccggcggcgaaacgcgtgaaactggattacccatacgatgttccagattacgcttaa

SEQ ID NO: 1521 - DNA, 1041 bp, synthetic construct
  source 1..1041: mol_type = other DNA; note = FOXP3DBD-(GS)4-SPOP-NLS-HA nucleic acid
atgcggccccccttcacctacgccacactgatcagatgggccatcctggaagccccagaaaaacagcgcacccttaacgagatctaccactggttcaccagaatgttcgcctttttccggaaccaccctgccacctggaagaacgccattcggcacaacctgtctctgcacaagtgcttcgtgcgggtcgagagcgagaagggagctgtgtggaccgtggacgagctggagttccggaagaagcggagccaaagaccaagcaggggcagcggcagcggcagcggcagcaacgggcttctccctgatgacaagcttaccctcttctgcgaggtgagtgttgtgcaagattctgtcaacatttctggccagaataccatgaacatggtaaaggttcctgagtgccggctggcagatgagttaggaggactgtgggagaattcccggttcacagactgctgcttgtgtgttgccggccaggaattccaggctcacaaggctatcttagcagctcgttctccggtttttagtgccatgtttgaacatgaaatggaggagagcaaaaagaatcgagttgaaatcaatgatgtggagcctgaagtttttaaggaaatgatgtgcttcatttacacggggaaggctccaaacctcgacaaaatggctgatgatttgctggcagctgctgacaagtatgccctggagcgcttaaaggtcatgtgtgaggatgccctctgcagtaacctgtccgtggagaacgctgcagaaattctcatcctggccgacctccacagtgcagatcagttgaaaactcaggcagtggatttcatcaactatcatgcttcggatgtcttggagacctctgggtggaagtcaatggtggtgtcacatccccacttggtggctgaggcataccgctctctggcttcagcacagtgcccttttctgggacccccacgcaaacgcctgaagcaatccggcagcggcagcccggcggcgaaacgcgtgaaactggattacccatacgatgttccagattacgcttaa

SEQ ID NO: 1522 - DNA, 1047 bp, synthetic construct
  source 1..1047: mol_type = other DNA; note = FOXP3DBD-(GS)5-SPOP-NLS-HA nucleic acid
atgcggccccccttcacctacgccacactgatcagatgggccatcctggaagccccagaaaaacagcgcacccttaacgagatctaccactggttcaccagaatgttcgcctttttccggaaccaccctgccacctggaagaacgccattcggcacaacctgtctctgcacaagtgcttcgtgcgggtcgagagcgagaagggagctgtgtggaccgtggacgagctggagttccggaagaagcggagccaaagaccaagcaggggcagcggcagcggcagcggcagcggcagcaacgggcttctccctgatgacaagcttaccctcttctgcgaggtgagtgttgtgcaagattctgtcaacatttctggccagaataccatgaacatggtaaaggttcctgagtgccggctggcagatgagttaggaggactgtgggagaattcccggttcacagactgctgcttgtgtgttgccggccaggaattccaggctcacaaggctatcttagcagctcgttctccggtttttagtgccatgtttgaacatgaaatggaggagagcaaaaagaatcgagttgaaatcaatgatgtggagcctgaagtttttaaggaaatgatgtgcttcatttacacggggaaggctccaaacctcgacaaaatggctgatgatttgctggcagctgctgacaagtatgccctggagcgcttaaaggtcatgtgtgaggatgccctctgcagtaacctgtccgtggagaacgctgcagaaattctcatcctggccgacctccacagtgcagatcagttgaaaactcaggcagtggatttcatcaactatcatgcttcggatgtcttggagacctctgggtggaagtcaatggtggtgtcacatccccacttggtggctgaggcataccgctctctggcttcagcacagtgcccttttctgggacccccacgcaaacgcctgaagcaatccggcagcggcagcccggcggcgaaacgcgtgaaactggattacccatacgatgttccagattacgcttaa

SEQ ID NO: 1523 - DNA, 1053 bp, synthetic construct
  source 1..1053: mol_type = other DNA; note = FOXP3DBD-(GS)6-SPOP-NLS-HA nucleic acid
atgcggccccccttcacctacgccacactgatcagatgggccatcctggaagccccagaaaaacagcgcacccttaacgagatctaccactggttcaccagaatgttcgcctttttccggaaccaccctgccacctggaagaacgccattcggcacaacctgtctctgcacaagtgcttcgtgcgggtcgagagcgagaagggagctgtgtggaccgtggacgagctggagttccggaagaagcggagccaaagaccaagcaggggcagcggcagcggcagcggcagcggcagcggcagcaacgggcttctccctgatgacaagcttaccctcttctgcgaggtgagtgttgtgcaagattctgtcaacatttctggccagaataccatgaacatggtaaaggttcctgagtgccggctggcagatgagttaggaggactgtgggagaattcccggttcacagactgctgcttgtgtgttgccggccaggaattccaggctcacaaggctatcttagcagctcgttctccggtttttagtgccatgtttgaacatgaaatggaggagagcaaaaagaatcgagttgaaatcaatgatgtggagcctgaagtttttaaggaaatgatgtgcttcatttacacggggaaggctccaaacctcgacaaaatggctgatgatttgctggcagctgctgacaagtatgccctggagcgcttaaaggtcatgtgtgaggatgccctctgcagtaacctgtccgtggagaacgctgcagaaattctcatcctggccgacctccacagtgcagatcagttgaaaactcaggcagtggatttcatcaactatcatgcttcggatgtcttggagacctctgggtggaagtcaatggtggtgtcacatccccacttggtggctgaggcataccgctctctggcttcagcacagtgcccttttctgggacccccacgcaaacgcctgaagcaatccggcagcggcagcccggcggcgaaacgcgtgaaactggattacccatacgatgttccagattacgcttaa

SEQ ID NO: 1524 - DNA, 918 bp, synthetic construct
  source 1..918: mol_type = other DNA; note = VL12.3-(GS)1-CHIP-NLS nucleic acid
atgggcagccaacctgtgctgacacagagccccagcgtgtccgccgctcctcggcagcgggtgaccatcagcgtgtccggctctaatagcaacatcggctccaacaccgtgaactggatccagcagctgcctggaagagcccccgagctgctgatgtacgacgacgacctgctcgccccaggcgtgtctgatagattcagcggctctagaagcggcaccagcgccagcctgaccatcagcggactgcagtctgaagatgaggccgactactacgccgctacatgggacgatagcctgaacggctgggtgttcggcggcggaacaaaggtgaccgtcctgagcggcggcagccggctgaacttcggggacgacatccccagcgctcttcgaatcgcgaagaagaagcgctggaacagcattgaggagcggcgcatccaccaggagagcgagctgcactcctacctctccaggctcattgccgcggagcgtgagagggagctggaagagtgccagcgaaaccacgagggtgatgaggacgacagccacgtccgggcccagcaggcctgcattgaggccaagcacgacaagtacatggcggacatggacgagcttttttctcaggtggatgagaagaggaagaagcgagacatccccgactacctgtgtggcaagatcagctttgagctgatgcgggagccgtgcatcacgcccagtggcatcacctacgaccgcaaggacatcgaggagcacctgcagcgtgtgggtcattttgacccggtgaccaggagccccctgacccaggaacagctcatccccaacttggctatgaaggaggttattgacgcattcatctctgagaatggctgggtggaggactacggcagcggcagcccggcggcgaaacgcgtgaaactggat

SEQ ID NO: 1525 - DNA, 924 bp, synthetic construct
  source 1..924: mol_type = other DNA; note = VL12.3-(GS)2-CHIP-NLS nucleic acid
atgggcagccaacctgtgctgacacagagccccagcgtgtccgccgctcctcggcagcgggtgaccatcagcgtgtccggctctaatagcaacatcggctccaacaccgtgaactggatccagcagctgcctggaagagcccccgagctgctgatgtacgacgacgacctgctcgccccaggcgtgtctgatagattcagcggctctagaagcggcaccagcgccagcctgaccatcagcggactgcagtctgaagatgaggccgactactacgccgctacatgggacgatagcctgaacggctgggtgttcggcggcggaacaaaggtgaccgtcctgagcggcggcagcggcagccggctgaacttcggggacgacatccccagcgctcttcgaatcgcgaagaagaagcgctggaacagcattgaggagcggcgcatccaccaggagagcgagctgcactcctacctctccaggctcattgccgcggagcgtgagagggagctggaagagtgccagcgaaaccacgagggtgatgaggacgacagccacgtccgggcccagcaggcctgcattgaggccaagcacgacaagtacatggcggacatggacgagcttttttctcaggtggatgagaagaggaagaagcgagacatccccgactacctgtgtggcaagatcagctttgagctgatgcgggagccgtgcatcacgcccagtggcatcacctacgaccgcaaggacatcgaggagcacctgcagcgtgtgggtcattttgacccggtgaccaggagccccctgacccaggaacagctcatccccaacttggctatgaaggaggttattgacgcattcatctctgagaatggctgggtggaggactacggcagcggcagcccggcggcgaaacgcgtgaaactggat

SEQ ID NO: 1526 - DNA, 930 bp, synthetic construct
  source 1..930: mol_type = other DNA; note = VL12.3-(GS)3-CHIP-NLS nucleic acid
atgggcagccaacctgtgctgacacagagccccagcgtgtccgccgctcctcggcagcgggtgaccatcagcgtgtccggctctaatagcaacatcggctccaacaccgtgaactggatccagcagctgcctggaagagcccccgagctgctgatgtacgacgacgacctgctcgccccaggcgtgtctgatagattcagcggctctagaagcggcaccagcgccagcctgaccatcagcggactgcagtctgaagatgaggccgactactacgccgctacatgggacgatagcctgaacggctgggtgttcggcggcggaacaaaggtgaccgtcctgagcggcggcagcggcagcggcagccggctgaacttcggggacgacatccccagcgctcttcgaatcgcgaagaagaagcgctggaacagcattgaggagcggcgcatccaccaggagagcgagctgcactcctacctctccaggctcattgccgcggagcgtgagagggagctggaagagtgccagcgaaaccacgagggtgatgaggacgacagccacgtccgggcccagcaggcctgcattgaggccaagcacgacaagtacatggcggacatggacgagcttttttctcaggtggatgagaagaggaagaagcgagacatccccgactacctgtgtggcaagatcagctttgagctgatgcgggagccgtgcatcacgcccagtggcatcacctacgaccgcaaggacatcgaggagcacctgcagcgtgtgggtcattttgacccggtgaccaggagccccctgacccaggaacagctcatccccaacttggctatgaaggaggttattgacgcattcatctctgagaatggctgggtggaggactacggcagcggcagcccggcggcgaaacgcgtgaaactggat

SEQ ID NO: 1527 - DNA, 936 bp, synthetic construct
  source 1..936: mol_type = other DNA; note = VL12.3-(GS)4-CHIP-NLS nucleic acid
atgggcagccaacctgtgctgacacagagccccagcgtgtccgccgctcctcggcagcgggtgaccatcagcgtgtccggctctaatagcaacatcggctccaacaccgtgaactggatccagcagctgcctggaagagcccccgagctgctgatgtacgacgacgacctgctcgccccaggcgtgtctgatagattcagcggctctagaagcggcaccagcgccagcctgaccatcagcggactgcagtctgaagatgaggccgactactacgccgctacatgggacgatagcctgaacggctgggtgttcggcggcggaacaaaggtgaccgtcctgagcggcggcagcggcagcggcagcggcagccggctgaacttcggggacgacatccccagcgctcttcgaatcgcgaagaagaagcgctggaacagcattgaggagcggcgcatccaccaggagagcgagctgcactcctacctctccaggctcattgccgcggagcgtgagagggagctggaagagtgccagcgaaaccacgagggtgatgaggacgacagccacgtccgggcccagcaggcctgcattgaggccaagcacgacaagtacatggcggacatggacgagcttttttctcaggtggatgagaagaggaagaagcgagacatccccgactacctgtgtggcaagatcagctttgagctgatgcgggagccgtgcatcacgcccagtggcatcacctacgaccgcaaggacatcgaggagcacctgcagcgtgtgggtcattttgacccggtgaccaggagccccctgacccaggaacagctcatccccaacttggctatgaaggaggttattgacgcattcatctctgagaatggctgggtggaggactacggcagcggcagcccggcggcgaaacgcgtgaaactggat

SEQ ID NO: 1528 - DNA, 942 bp, synthetic construct
  source 1..942: mol_type = other DNA; note = VL12.3-(GS)5-CHIP-NLS nucleic acid
atgggcagccaacctgtgctgacacagagccccagcgtgtccgccgctcctcggcagcgggtgaccatcagcgtgtccggctctaatagcaacatcggctccaacaccgtgaactggatccagcagctgcctggaagagcccccgagctgctgatgtacgacgacgacctgctcgccccaggcgtgtctgatagattcagcggctctagaagcggcaccagcgccagcctgaccatcagcggactgcagtctgaagatgaggccgactactacgccgctacatgggacgatagcctgaacggctgggtgttcggcggcggaacaaaggtgaccgtcctgagcggcggcagcggcagcggcagcggcagcggcagccggctgaacttcggggacgacatccccagcgctcttcgaatcgcgaagaagaagcgctggaacagcattgaggagcggcgcatccaccaggagagcgagctgcactcctacctctccaggctcattgccgcggagcgtgagagggagctggaagagtgccagcgaaaccacgagggtgatgaggacgacagccacgtccgggcccagcaggcctgcattgaggccaagcacgacaagtacatggcggacatggacgagcttttttctcaggtggatgagaagaggaagaagcgagacatccccgactacctgtgtggcaagatcagctttgagctgatgcgggagccgtgcatcacgcccagtggcatcacctacgaccgcaaggacatcgaggagcacctgcagcgtgtgggtcattttgacccggtgaccaggagccccctgacccaggaacagctcatccccaacttggctatgaaggaggttattgacgcattcatctctgagaatggctgggtggaggactacggcagcggcagcccggcggcgaaacgcgtgaaactggat

SEQ ID NO: 1529 - DNA, 948 bp, synthetic construct
  source 1..948: mol_type = other DNA; note = VL12.3-(GS)6-CHIP-NLS nucleic acid
atgggcagccaacctgtgctgacacagagccccagcgtgtccgccgctcctcggcagcgggtgaccatcagcgtgtccggctctaatagcaacatcggctccaacaccgtgaactggatccagcagctgcctggaagagcccccgagctgctgatgtacgacgacgacctgctcgccccaggcgtgtctgatagattcagcggctctagaagcggcaccagcgccagcctgaccatcagcggactgcagtctgaagatgaggccgactactacgccgctacatgggacgatagcctgaacggctgggtgttcggcggcggaacaaaggtgaccgtcctgagcggcggcagcggcagcggcagcggcagcggcagcggcagccggctgaacttcggggacgacatccccagcgctcttcgaatcgcgaagaagaagcgctggaacagcattgaggagcggcgcatccaccaggagagcgagctgcactcctacctctccaggctcattgccgcggagcgtgagagggagctggaagagtgccagcgaaaccacgagggtgatgaggacgacagccacgtccgggcccagcaggcctgcattgaggccaagcacgacaagtacatggcggacatggacgagcttttttctcaggtggatgagaagaggaagaagcgagacatccccgactacctgtgtggcaagatcagctttgagctgatgcgggagccgtgcatcacgcccagtggcatcacctacgaccgcaaggacatcgaggagcacctgcagcgtgtgggtcattttgacccggtgaccaggagccccctgacccaggaacagctcatccccaacttggctatgaaggaggttattgacgcattcatctctgagaatggctgggtggaggactacggcagcggcagcccggcggcgaaacgcgtgaaactggat

SEQ ID NO: 1530 - DNA, 948 bp, synthetic construct
  source 1..948: mol_type = other DNA; note = VL12.3-(GS)1-CHIP-NLS-HA nucleic acid
atgggcagccaacctgtgctgacacagagccccagcgtgtccgccgctcctcggcagcgggtgaccatcagcgtgtccggctctaatagcaacatcggctccaacaccgtgaactggatccagcagctgcctggaagagcccccgagctgctgatgtacgacgacgacctgctcgccccaggcgtgtctgatagattcagcggctctagaagcggcaccagcgccagcctgaccatcagcggactgcagtctgaagatgaggccgactactacgccgctacatgggacgatagcctgaacggctgggtgttcggcggcggaacaaaggtgaccgtcctgagcggcggcagccggctgaacttcggggacgacatccccagcgctcttcgaatcgcgaagaagaagcgctggaacagcattgaggagcggcgcatccaccaggagagcgagctgcactcctacctctccaggctcattgccgcggagcgtgagagggagctggaagagtgccagcgaaaccacgagggtgatgaggacgacagccacgtccgggcccagcaggcctgcattgaggccaagcacgacaagtacatggcggacatggacgagcttttttctcaggtggatgagaagaggaagaagcgagacatccccgactacctgtgtggcaagatcagctttgagctgatgcgggagccgtgcatcacgcccagtggcatcacctacgaccgcaaggacatcgaggagcacctgcagcgtgtgggtcattttgacccggtgaccaggagccccctgacccaggaacagctcatccccaacttggctatgaaggaggttattgacgcattcatctctgagaatggctgggtggaggactacggcagcggcagcccggcggcgaaacgcgtgaaactggattacccatacgatgttccagattacgcttaa

SEQ ID NO: 1531 - DNA, 954 bp, synthetic construct
  source 1..954: mol_type = other DNA; note = VL12.3-(GS)2-CHIP-NLS-HA nucleic acid
atgggcagccaacctgtgctgacacagagccccagcgtgtccgccgctcctcggcagcgggtgaccatcagcgtgtccggctctaatagcaacatcggctccaacaccgtgaactggatccagcagctgcctggaagagcccccgagctgctgatgtacgacgacgacctgctcgccccaggcgtgtctgatagattcagcggctctagaagcggcaccagcgccagcctgaccatcagcggactgcagtctgaagatgaggccgactactacgccgctacatgggacgatagcctgaacggctgggtgttcggcggcggaacaaaggtgaccgtcctgagcggcggcagcggcagccggctgaacttcggggacgacatccccagcgctcttcgaatcgcgaagaagaagcgctggaacagcattgaggagcggcgcatccaccaggagagcgagctgcactcctacctctccaggctcattgccgcggagcgtgagagggagctggaagagtgccagcgaaaccacgagggtgatgaggacgacagccacgtccgggcccagcaggcctgcattgaggccaagcacgacaagtacatggcggacatggacgagcttttttctcaggtggatgagaagaggaagaagcgagacatccccgactacctgtgtggcaagatcagctttgagctgatgcgggagccgtgcatcacgcccagtggcatcacctacgaccgcaaggacatcgaggagcacctgcagcgtgtgggtcattttgacccggtgaccaggagccccctgacccaggaacagctcatccccaacttggctatgaaggaggttattgacgcattcatctctgagaatggctgggtggaggactacggcagcggcagcccggcggcgaaacgcgtgaaactggattacccatacgatgttccagattacgcttaa

SEQ ID NO: 1532 - DNA, 960 bp, synthetic construct
  source 1..960: mol_type = other DNA; note = VL12.3-(GS)3-CHIP-NLS-HA nucleic acid
atgggcagccaacctgtgctgacacagagccccagcgtgtccgccgctcctcggcagcgggtgaccatcagcgtgtccggctctaatagcaacatcggctccaacaccgtgaactggatccagcagctgcctggaagagcccccgagctgctgatgtacgacgacgacctgctcgccccaggcgtgtctgatagattcagcggctctagaagcggcaccagcgccagcctgaccatcagcggactgcagtctgaagatgaggccgactactacgccgctacatgggacgatagcctgaacggctgggtgttcggcggcggaacaaaggtgaccgtcctgagcggcggcagcggcagcggcagccggctgaacttcggggacgacatccccagcgctcttcgaatcgcgaagaagaagcgctggaacagcattgaggagcggcgcatccaccaggagagcgagctgcactcctacctctccaggctcattgccgcggagcgtgagagggagctggaagagtgccagcgaaaccacgagggtgatgaggacgacagccacgtccgggcccagcaggcctgcattgaggccaagcacgacaagtacatggcggacatggacgagcttttttctcaggtggatgagaagaggaagaagcgagacatccccgactacctgtgtggcaagatcagctttgagctgatgcgggagccgtgcatcacgcccagtggcatcacctacgaccgcaaggacatcgaggagcacctgcagcgtgtgggtcattttgacccggtgaccaggagccccctgacccaggaacagctcatccccaacttggctatgaaggaggttattgacgcattcatctctgagaatggctgggtggaggactacggcagcggcagcccggcggcgaaacgcgtgaaactggattacccatacgatgttccagattacgcttaa

SEQ ID NO: 1533 - DNA, 966 bp, synthetic construct
  source 1..966: mol_type = other DNA; note = VL12.3-(GS)4-CHIP-NLS-HA nucleic acid
atgggcagccaacctgtgctgacacagagccccagcgtgtccgccgctcctcggcagcgggtgaccatcagcgtgtccggctctaatagcaacatcggctccaacaccgtgaactggatccagcagctgcctggaagagcccccgagctgctgatgtacgacgacgacctgctcgccccaggcgtgtctgatagattcagcggctctagaagcggcaccagcgccagcctgaccatcagcggactgcagtctgaagatgaggccgactactacgccgctacatgggacgatagcctgaacggctgggtgttcggcggcggaacaaaggtgaccgtcctgagcggcggcagcggcagcggcagcggcagccggctgaacttcggggacgacatccccagcgctcttcgaatcgcgaagaagaagcgctggaacagcattgaggagcggcgcatccaccaggagagcgagctgcactcctacctctccaggctcattgccgcggagcgtgagagggagctggaagagtgccagcgaaaccacgagggtgatgaggacgacagccacgtccgggcccagcaggcctgcattgaggccaagcacgacaagtacatggcggacatggacgagcttttttctcaggtggatgagaagaggaagaagcgagacatccccgactacctgtgtggcaagatcagctttgagctgatgcgggagccgtgcatcacgcccagtggcatcacctacgaccgcaaggacatcgaggagcacctgcagcgtgtgggtcattttgacccggtgaccaggagccccctgacccaggaacagctcatccccaacttggctatgaaggaggttattgacgcattcatctctgagaatggctgggtggaggactacggcagcggcagcccggcggcgaaacgcgtgaaactggattacccatacgatgttccagattacgcttaa

SEQ ID NO: 1534 - DNA, 972 bp, synthetic construct
  source 1..972: mol_type = other DNA; note = VL12.3-(GS)5-CHIP-NLS-HA nucleic acid
atgggcagccaacctgtgctgacacagagccccagcgtgtccgccgctcctcggcagcgggtgaccatcagcgtgtccggctctaatagcaacatcggctccaacaccgtgaactggatccagcagctgcctggaagagcccccgagctgctgatgtacgacgacgacctgctcgccccaggcgtgtctgatagattcagcggctctagaagcggcaccagcgccagcctgaccatcagcggactgcagtctgaagatgaggccgactactacgccgctacatgggacgatagcctgaacggctgggtgttcggcggcggaacaaaggtgaccgtcctgagcggcggcagcggcagcggcagcggcagcggcagccggctgaacttcggggacgacatccccagcgctcttcgaatcgcgaagaagaagcgctggaacagcattgaggagcggcgcatccaccaggagagcgagctgcactcctacctctccaggctcattgccgcggagcgtgagagggagctggaagagtgccagcgaaaccacgagggtgatgaggacgacagccacgtccgggcccagcaggcctgcattgaggccaagcacgacaagtacatggcggacatggacgagcttttttctcaggtggatgagaagaggaagaagcgagacatccccgactacctgtgtggcaagatcagctttgagctgatgcgggagccgtgcatcacgcccagtggcatcacctacgaccgcaaggacatcgaggagcacctgcagcgtgtgggtcattttgacccggtgaccaggagccccctgacccaggaacagctcatccccaacttggctatgaaggaggttattgacgcattcatctctgagaatggctgggtggaggactacggcagcggcagcccggcggcgaaacgcgtgaaactggattacccatacgatgttccagattacgcttaa

SEQ ID NO: 1535 - DNA, 978 bp, synthetic construct
  source 1..978: mol_type = other DNA; note = VL12.3-(GS)6-CHIP-NLS-HA nucleic acid
atgggcagccaacctgtgctgacacagagccccagcgtgtccgccgctcctcggcagcgggtgaccatcagcgtgtccggctctaatagcaacatcggctccaacaccgtgaactggatccagcagctgcctggaagagcccccgagctgctgatgtacgacgacgacctgctcgccccaggcgtgtctgatagattcagcggctctagaagcggcaccagcgccagcctgaccatcagcggactgcagtctgaagatgaggccgactactacgccgctacatgggacgatagcctgaacggctgggtgttcggcggcggaacaaaggtgaccgtcctgagcggcggcagcggcagcggcagcggcagcggcagcggcagccggctgaacttcggggacgacatccccagcgctcttcgaatcgcgaagaagaagcgctggaacagcattgaggagcggcgcatccaccaggagagcgagctgcactcctacctctccaggctcattgccgcggagcgtgagagggagctggaagagtgccagcgaaaccacgagggtgatgaggacgacagccacgtccgggcccagcaggcctgcattgaggccaagcacgacaagtacatggcggacatggacgagcttttttctcaggtggatgagaagaggaagaagcgagacatccccgactacctgtgtggcaagatcagctttgagctgatgcgggagccgtgcatcacgcccagtggcatcacctacgaccgcaaggacatcgaggagcacctgcagcgtgtgggtcattttgacccggtgaccaggagccccctgacccaggaacagctcatccccaacttggctatgaaggaggttattgacgcattcatctctgagaatggctgggtggaggactacggcagcggcagcccggcggcgaaacgcgtgaaactggattacccatacgatgttccagattacgcttaa

SEQ ID NO: 1536 - DNA, 501 bp, synthetic construct
  source 1..501: mol_type = other DNA; note = NLS-DCAF1-(GS)1-VL12.3 nucleic acid
ccggcggcgaaacgcgtgaaactggatggcagcggcagcggcagccaggcgccgattaactttaccagccgcctgaaccgccgcgcgagctttccgaaatatggcggcgtggatggcggctgctttgatcgccatctgatttttagccgcggcagcggcagccaacctgtgctgacacagagccccagcgtgtccgccgctcctcggcagcgggtgaccatcagcgtgtccggctctaatagcaacatcggctccaacaccgtgaactggatccagcagctgcctggaagagcccccgagctgctgatgtacgacgacgacctgctcgccccaggcgtgtctgatagattcagcggctctagaagcggcaccagcgccagcctgaccatcagcggactgcagtctgaagatgaggccgactactacgccgctacatgggacgatagcctgaacggctgggtgttcggcggcggaacaaaggtgaccgtcctgagcggctaa

SEQ ID NO: 1537 - DNA, 507 bp, synthetic construct
  source 1..507: mol_type = other DNA; note = NLS-DCAF1-(GS)2-VL12.3 nucleic acid
ccggcggcgaaacgcgtgaaactggatggcagcggcagcggcagccaggcgccgattaactttaccagccgcctgaaccgccgcgcgagctttccgaaatatggcggcgtggatggcggctgctttgatcgccatctgatttttagccgcggcagcggcagcggcagccaacctgtgctgacacagagccccagcgtgtccgccgctcctcggcagcgggtgaccatcagcgtgtccggctctaatagcaacatcggctccaacaccgtgaactggatccagcagctgcctggaagagcccccgagctgctgatgtacgacgacgacctgctcgccccaggcgtgtctgatagattcagcggctctagaagcggcaccagcgccagcctgaccatcagcggactgcagtctgaagatgaggccgactactacgccgctacatgggacgatagcctgaacggctgggtgttcggcggcggaacaaaggtgaccgtcctgagcggctaa

SEQ ID NO: 1538 - DNA, 513 bp, synthetic construct
  source 1..513: mol_type = other DNA; note = NLS-DCAF1-(GS)3-VL12.3 nucleic acid
ccggcggcgaaacgcgtgaaactggatggcagcggcagcggcagccaggcgccgattaactttaccagccgcctgaaccgccgcgcgagctttccgaaatatggcggcgtggatggcggctgctttgatcgccatctgatttttagccgcggcagcggcagcggcagcggcagccaacctgtgctgacacagagccccagcgtgtccgccgctcctcggcagcgggtgaccatcagcgtgtccggctctaatagcaacatcggctccaacaccgtgaactggatccagcagctgcctggaagagcccccgagctgctgatgtacgacgacgacctgctcgccccaggcgtgtctgatagattcagcggctctagaagcggcaccagcgccagcctgaccatcagcggactgcagtctgaagatgaggccgactactacgccgctacatgggacgatagcctgaacggctgggtgttcggcggcggaacaaaggtgaccgtcctgagcggctaa

SEQ ID NO: 1539 - DNA, 519 bp, synthetic construct
  source 1..519: mol_type = other DNA; note = NLS-DCAF1-(GS)4-VL12.3 nucleic acid
ccggcggcgaaacgcgtgaaactggatggcagcggcagcggcagccaggcgccgattaactttaccagccgcctgaaccgccgcgcgagctttccgaaatatggcggcgtggatggcggctgctttgatcgccatctgatttttagccgcggcagcggcagcggcagcggcagcggcagccaacctgtgctgacacagagccccagcgtgtccgccgctcctcggcagcgggtgaccatcagcgtgtccggctctaatagcaacatcggctccaacaccgtgaactggatccagcagctgcctggaagagcccccgagctgctgatgtacgacgacgacctgctcgccccaggcgtgtctgatagattcagcggctctagaagcggcaccagcgccagcctgaccatcagcggactgcagtctgaagatgaggccgactactacgccgctacatgggacgatagcctgaacggctgggtgttcggcggcggaacaaaggtgaccgtcctgagcggctaa

SEQ ID NO: 1540 - DNA, 525 bp, synthetic construct
  source 1..525: mol_type = other DNA; note = NLS-DCAF1-(GS)5-VL12.3 nucleic acid
ccggcggcgaaacgcgtgaaactggatggcagcggcagcggcagccaggcgccgattaactttaccagccgcctgaaccgccgcgcgagctttccgaaatatggcggcgtggatggcggctgctttgatcgccatctgatttttagccgcggcagcggcagcggcagcggcagcggcagcggcagccaacctgtgctgacacagagccccagcgtgtccgccgctcctcggcagcgggtgaccatcagcgtgtccggctctaatagcaacatcggctccaacaccgtgaactggatccagcagctgcctggaagagcccccgagctgctgatgtacgacgacgacctgctcgccccaggcgtgtctgatagattcagcggctctagaagcggcaccagcgccagcctgaccatcagcggactgcagtctgaagatgaggccgactactacgccgctacatgggacgatagcctgaacggctgggtgttcggcggcggaacaaaggtgaccgtcctgagcggctaa

SEQ ID NO: 1541 - DNA, 531 bp, synthetic construct
  source 1..531: mol_type = other DNA; note = NLS-DCAF1-(GS)6-VL12.3 nucleic acid
ccggcggcgaaacgcgtgaaactggatggcagcggcagcggcagccaggcgccgattaactttaccagccgcctgaaccgccgcgcgagctttccgaaatatggcggcgtggatggcggctgctttgatcgccatctgatttttagccgcggcagcggcagcggcagcggcagcggcagcggcagcggcagccaacctgtgctgacacagagccccagcgtgtccgccgctcctcggcagcgggtgaccatcagcgtgtccggctctaatagcaacatcggctccaacaccgtgaactggatccagcagctgcctggaagagcccccgagctgctgatgtacgacgacgacctgctcgccccaggcgtgtctgatagattcagcggctctagaagcggcaccagcgccagcctgaccatcagcggactgcagtctgaagatgaggccgactactacgccgctacatgggacgatagcctgaacggctgggtgttcggcggcggaacaaaggtgaccgtcctgagcggctaa

SEQ ID NO: 1542 - DNA, 531 bp, synthetic construct
  source 1..531: mol_type = other DNA; note = HA-NLS-DCAF1-(GS)1-VL12.3 nucleic acid
atgtacccatacgatgttccagattacgctccggcggcgaaacgcgtgaaactggatggcagcggcagcggcagccaggcgccgattaactttaccagccgcctgaaccgccgcgcgagctttccgaaatatggcggcgtggatggcggctgctttgatcgccatctgatttttagccgcggcagcggcagccaacctgtgctgacacagagccccagcgtgtccgccgctcctcggcagcgggtgaccatcagcgtgtccggctctaatagcaacatcggctccaacaccgtgaactggatccagcagctgcctggaagagcccccgagctgctgatgtacgacgacgacctgctcgccccaggcgtgtctgatagattcagcggctctagaagcggcaccagcgccagcctgaccatcagcggactgcagtctgaagatgaggccgactactacgccgctacatgggacgatagcctgaacggctgggtgttcggcggcggaacaaaggtgaccgtcctgagcggctaa

SEQ ID NO: 1543 - DNA, 537 bp, synthetic construct
  source 1..537: mol_type = other DNA; note = HA-NLS-DCAF1-(GS)2-VL12.3 nucleic acid
atgtacccatacgatgttccagattacgctccggcggcgaaacgcgtgaaactggatggcagcggcagcggcagccaggcgccgattaactttaccagccgcctgaaccgccgcgcgagctttccgaaatatggcggcgtggatggcggctgctttgatcgccatctgatttttagccgcggcagcggcagcggcagccaacctgtgctgacacagagccccagcgtgtccgccgctcctcggcagcgggtgaccatcagcgtgtccggctctaatagcaacatcggctccaacaccgtgaactggatccagcagctgcctggaagagcccccgagctgctgatgtacgacgacgacctgctcgccccaggcgtgtctgatagattcagcggctctagaagcggcaccagcgccagcctgaccatcagcggactgcagtctgaagatgaggccgactactacgccgctacatgggacgatagcctgaacggctgggtgttcggcggcggaacaaaggtgaccgtcctgagcggctaa

SEQ ID NO: 1544 - DNA, 543 bp, synthetic construct
  source 1..543: mol_type = other DNA; note = HA-NLS-DCAF1-(GS)3-VL12.3 nucleic acid
atgtacccatacgatgttccagattacgctccggcggcgaaacgcgtgaaactggatggcagcggcagcggcagccaggcgccgattaactttaccagccgcctgaaccgccgcgcgagctttccgaaatatggcggcgtggatggcggctgctttgatcgccatctgatttttagccgcggcagcggcagcggcagcggcagccaacctgtgctgacacagagccccagcgtgtccgccgctcctcggcagcgggtgaccatcagcgtgtccggctctaatagcaacatcggctccaacaccgtgaactggatccagcagctgcctggaagagcccccgagctgctgatgtacgacgacgacctgctcgccccaggcgtgtctgatagattcagcggctctagaagcggcaccagcgccagcctgaccatcagcggactgcagtctgaagatgaggccgactactacgccgctacatgggacgatagcctgaacggctgggtgttcggcggcggaacaaaggtgaccgtcctgagcggctaa

SEQ ID NO: 1545 - DNA, 549 bp, synthetic construct
  source 1..549: mol_type = other DNA; note = HA-NLS-DCAF1-(GS)4-VL12.3 nucleic acid
atgtacccatacgatgttccagattacgctccggcggcgaaacgcgtgaaactggatggcagcggcagcggcagccaggcgccgattaactttaccagccgcctgaaccgccgcgcgagctttccgaaatatggcggcgtggatggcggctgctttgatcgccatctgatttttagccgcggcagcggcagcggcagcggcagcggcagccaacctgtgctgacacagagccccagcgtgtccgccgctcctcggcagcgggtgaccatcagcgtgtccggctctaatagcaacatcggctccaacaccgtgaactggatccagcagctgcctggaagagcccccgagctgctgatgtacgacgacgacctgctcgccccaggcgtgtctgatagattcagcggctctagaagcggcaccagcgccagcctgaccatcagcggactgcagtctgaagatgaggccgactactacgccgctacatgggacgatagcctgaacggctgggtgttcggcggcggaacaaaggtgaccgtcctgagcggctaa

SEQ ID NO: 1546 - DNA, 555 bp, synthetic construct
  source 1..555: mol_type = other DNA; note = HA-NLS-DCAF1-(GS)5-VL12.3 nucleic acid
atgtacccatacgatgttccagattacgctccggcggcgaaacgcgtgaaactggatggcagcggcagcggcagccaggcgccgattaactttaccagccgcctgaaccgccgcgcgagctttccgaaatatggcggcgtggatggcggctgctttgatcgccatctgatttttagccgcggcagcggcagcggcagcggcagcggcagcggcagccaacctgtgctgacacagagccccagcgtgtccgccgctcctcggcagcgggtgaccatcagcgtgtccggctctaatagcaacatcggctccaacaccgtgaactggatccagcagctgcctggaagagcccccgagctgctgatgtacgacgacgacctgctcgccccaggcgtgtctgatagattcagcggctctagaagcggcaccagcgccagcctgaccatcagcggactgcagtctgaagatgaggccgactactacgccgctacatgggacgatagcctgaacggctgggtgttcggcggcggaacaaaggtgaccgtcctgagcggctaa

SEQ ID NO: 1547 - DNA, 561 bp, synthetic construct
  source 1..561: mol_type = other DNA; note = HA-NLS-DCAF1-(GS)6-VL12.3 nucleic acid
atgtacccatacgatgttccagattacgctccggcggcgaaacgcgtgaaactggatggcagcggcagcggcagccaggcgccgattaactttaccagccgcctgaaccgccgcgcgagctttccgaaatatggcggcgtggatggcggctgctttgatcgccatctgatttttagccgcggcagcggcagcggcagcggcagcggcagcggcagcggcagccaacctgtgctgacacagagccccagcgtgtccgccgctcctcggcagcgggtgaccatcagcgtgtccggctctaatagcaacatcggctccaacaccgtgaactggatccagcagctgcctggaagagcccccgagctgctgatgtacgacgacgacctgctcgccccaggcgtgtctgatagattcagcggctctagaagcggcaccagcgccagcctgaccatcagcggactgcagtctgaagatgaggccgactactacgccgctacatgggacgatagcctgaacggctgggtgttcggcggcggaacaaaggtgaccgtcctgagcggctaa

SEQ ID NO: 1548 - DNA, 1464 bp, synthetic construct
  source 1..1464: mol_type = other DNA; note = NLS-VL12.3-(GS)1-E6AP nucleic acid
ccggcggcgaaacgcgtgaaactggatggcagcggcagcggcagcggcagccaacctgtgctgacacagagccccagcgtgtccgccgctcctcggcagcgggtgaccatcagcgtgtccggctctaatagcaacatcggctccaacaccgtgaactggatccagcagctgcctggaagagcccccgagctgctgatgtacgacgacgacctgctcgccccaggcgtgtctgatagattcagcggctctagaagcggcaccagcgccagcctgaccatcagcggactgcagtctgaagatgaggccgactactacgccgctacatgggacgatagcctgaacggctgggtgttcggcggcggaacaaaggtgaccgtcctgagcggcggcagcaatccatatttgagactcaaagttagacgtgaccatatcatagatgatgcacttgtccggctagagatgatcgctatggaaaatcctgcagacttgaagaagcagttgtatgtggaatttgaaggagaacaaggagttgatgagggaggtgtttccaaagaattttttcagctggttgtggaggaaatcttcaatccagatattggtatgttcacatacgatgaatctacaaaattgttttggtttaatccatcttcttttgaaactgagggtcagtttactctgattggcatagtactgggtctggctatttacaataactgtatactggatgtacattttcccatggttgtctacaggaagctaatggggaaaaaaggaacttttcgtgacttgggagactctcacccagttctatatcagagtttaaaagatttattggagtatgaagggaatgtggaagatgacatgatgatcactttccagatatcacagacagatctttttggtaacccaatgatgtatgatctaaaggaaaatggtgataaaattccaattacaaatgaaaacaggaaggaatttgtcaatctttattctgactacattctcaataaatcagtagaaaaacagttcaaggcttttcggagaggttttcatatggtgaccaatgaatctcccttaaagtacttattcagaccagaagaaattgaattgcttatatgtggaagccggaatctagatttccaagcactagaagaaactacagaatatgacggtggctataccagggactctgttctgattagggagttctgggaaatcgttcattcatttacagatgaacagaaaagactcttcttgcagtttacaacgggcacagacagagcacctgtgggaggactaggaaaattaaagatgattatagccaaaaatggcccagacacagaaaggttacctacatctcatacttgctttaatgtgcttttacttccggaatactcaagcaaagaaaaacttaaagagagattgttgaaggccatcacgtatgccaaaggatttggcatgctgtaa

SEQ ID NO: 1549 - DNA, 1470 bp, synthetic construct
  source 1..1470: mol_type = other DNA; note = NLS-VL12.3-(GS)2-E6AP nucleic acid
ccggcggcgaaacgcgtgaaactggatggcagcggcagcggcagcggcagccaacctgtgctgacacagagccccagcgtgtccgccgctcctcggcagcgggtgaccatcagcgtgtccggctctaatagcaacatcggctccaacaccgtgaactggatccagcagctgcctggaagagcccccgagctgctgatgtacgacgacgacctgctcgccccaggcgtgtctgatagattcagcggctctagaagcggcaccagcgccagcctgaccatcagcggactgcagtctgaagatgaggccgactactacgccgctacatgggacgatagcctgaacggctgggtgttcggcggcggaacaaaggtgaccgtcctgagcggcggcagcggcagcaatccatatttgagactcaaagttagacgtgaccatatcatagatgatgcacttgtccggctagagatgatcgctatggaaaatcctgcagacttgaagaagcagttgtatgtggaatttgaaggagaacaaggagttgatgagggaggtgtttccaaagaattttttcagctggttgtggaggaaatcttcaatccagatattggtatgttcacatacgatgaatctacaaaattgttttggtttaatccatcttcttttgaaactgagggtcagtttactctgattggcatagtactgggtctggctatttacaataactgtatactggatgtacattttcccatggttgtctacaggaagctaatggggaaaaaaggaacttttcgtgacttgggagactctcacccagttctatatcagagtttaaaagatttattggagtatgaagggaatgtggaagatgacatgatgatcactttccagatatcacagacagatctttttggtaacccaatgatgtatgatctaaaggaaaatggtgataaaattccaattacaaatgaaaacaggaaggaatttgtcaatctttattctgactacattctcaataaatcagtagaaaaacagttcaaggcttttcggagaggttttcatatggtgaccaatgaatctcccttaaagtacttattcagaccagaagaaattgaattgcttatatgtggaagccggaatctagatttccaagcactagaagaaactacagaatatgacggtggctataccagggactctgttctgattagggagttctgggaaatcgttcattcatttacagatgaacagaaaagactcttcttgcagtttacaacgggcacagacagagcacctgtgggaggactaggaaaattaaagatgattatagccaaaaatggcccagacacagaaaggttacctacatctcatacttgctttaatgtgcttttacttccggaatactcaagcaaagaaaaacttaaagagagattgttgaaggccatcacgtatgccaaaggatttggcatgctgtaa

SEQ ID NO: 1550 - DNA, 1476 bp, synthetic construct
  source 1..1476: mol_type = other DNA; note = NLS-VL12.3-(GS)3-E6AP nucleic acid
ccggcggcgaaacgcgtgaaactggatggcagcggcagcggcagcggcagccaacctgtgctgacacagagccccagcgtgtccgccgctcctcggcagcgggtgaccatcagcgtgtccggctctaatagcaacatcggctccaacaccgtgaactggatccagcagctgcctggaagagcccccgagctgctgatgtacgacgacgacctgctcgccccaggcgtgtctgatagattcagcggctctagaagcggcaccagcgccagcctgaccatcagcggactgcagtctgaagatgaggccgactactacgccgctacatgggacgatagcctgaacggctgggtgttcggcggcggaacaaaggtgaccgtcctgagcggcggcagcggcagcggcagcaatccatatttgagactcaaagttagacgtgaccatatcatagatgatgcacttgtccggctagagatgatcgctatggaaaatcctgcagacttgaagaagcagttgtatgtggaatttgaaggagaacaaggagttgatgagggaggtgtttccaaagaattttttcagctggttgtggaggaaatcttcaatccagatattggtatgttcacatacgatgaatctacaaaattgttttggtttaatccatcttcttttgaaactgagggtcagtttactctgattggcatagtactgggtctggctatttacaataactgtatactggatgtacattttcccatggttgtctacaggaagctaatggggaaaaaaggaacttttcgtgacttgggagactctcacccagttctatatcagagtttaaaagatttattggagtatgaagggaatgtggaagatgacatgatgatcactttccagatatcacagacagatctttttggtaacccaatgatgtatgatctaaaggaaaatggtgataaaattccaattacaaatgaaaacaggaaggaatttgtcaatctttattctgactacattctcaataaatcagtagaaaaacagttcaaggcttttcggagaggttttcatatggtgaccaatgaatctcccttaaagtacttattcagaccagaagaaattgaattgcttatatgtggaagccggaatctagatttccaagcactagaagaaactacagaatatgacggtggctataccagggactctgttctgattagggagttctgggaaatcgttcattcatttacagatgaacagaaaagactcttcttgcagtttacaacgggcacagacagagcacctgtgggaggactaggaaaattaaagatgattatagccaaaaatggcccagacacagaaaggttacctacatctcatacttgctttaatgtgcttttacttccggaatactcaagcaaagaaaaacttaaagagagattgttgaaggccatcacgtatgccaaaggatttggcatgctgtaa

SEQ ID NO: 1551 - DNA, 1482 bp, synthetic construct
  source 1..1482: mol_type = other DNA; note = NLS-VL12.3-(GS)4-E6AP nucleic acid
ccggcggcgaaacgcgtgaaactggatggcagcggcagcggcagcggcagccaacctgtgctgacacagagccccagcgtgtccgccgctcctcggcagcgggtgaccatcagcgtgtccggctctaatagcaacatcggctccaacaccgtgaactggatccagcagctgcctggaagagcccccgagctgctgatgtacgacgacgacctgctcgccccaggcgtgtctgatagattcagcggctctagaagcggcaccagcgccagcctgaccatcagcggactgcagtctgaagatgaggccgactactacgccgctacatgggacgatagcctgaacggctgggtgttcggcggcggaacaaaggtgaccgtcctgagcggcggcagcggcagcggcagcggcagcaatccatatttgagactcaaagttagacgtgaccatatcatagatgatgcacttgtccggctagagatgatcgctatggaaaatcctgcagacttgaagaagcagttgtatgtggaatttgaaggagaacaaggagttgatgagggaggtgtttccaaagaattttttcagctggttgtggaggaaatcttcaatccagatattggtatgttcacatacgatgaatctacaaaattgttttggtttaatccatcttcttttgaaactgagggtcagtttactctgattggcatagtactgggtctggctatttacaataactgtatactggatgtacattttcccatggttgtctacaggaagctaatggggaaaaaaggaacttttcgtgacttgggagactctcacccagttctatatcagagtttaaaagatttattggagtatgaagggaatgtggaagatgacatgatgatcactttccagatatcacagacagatctttttggtaacccaatgatgtatgatctaaaggaaaatggtgataaaattccaattacaaatgaaaacaggaaggaatttgtcaatctttattctgactacattctcaataaatcagtagaaaaacagttcaaggcttttcggagaggttttcatatggtgaccaatgaatctcccttaaagtacttattcagaccagaagaaattgaattgcttatatgtggaagccggaatctagatttccaagcactagaagaaactacagaatatgacggtggctataccagggactctgttctgattagggagttctgggaaatcgttcattcatttacagatgaacagaaaagactcttcttgcagtttacaacgggcacagacagagcacctgtgggaggactaggaaaattaaagatgattatagccaaaaatggcccagacacagaaaggttacctacatctcatacttgctttaatgtgcttttacttccggaatactcaagcaaagaaaaacttaaagagagattgttgaaggccatcacgtatgccaaaggatttggcatgctgtaa

SEQ ID NO: 1552 - DNA, 1488 bp, synthetic construct
  source 1..1488: mol_type = other DNA; note = NLS-VL12.3-(GS)5-E6AP nucleic acid
ccggcggcgaaacgcgtgaaactggatggcagcggcagcggcagcggcagccaacctgtgctgacacagagccccagcgtgtccgccgctcctcggcagcgggtgaccatcagcgtgtccggctctaatagcaacatcggctccaacaccgtgaactggatccagcagctgcctggaagagcccccgagctgctgatgtacgacgacgacctgctcgccccaggcgtgtctgatagattcagcggctctagaagcggcaccagcgccagcctgaccatcagcggactgcagtctgaagatgaggccgactactacgccgctacatgggacgatagcctgaacggctgggtgttcggcggcggaacaaaggtgaccgtcctgagcggcggcagcggcagcggcagcggcagcggcagcaatccatatttgagactcaaagttagacgtgaccatatcatagatgatgcacttgtccggctagagatgatcgctatggaaaatcctgcagacttgaagaagcagttgtatgtggaatttgaaggagaacaaggagttgatgagggaggtgtttccaaagaattttttcagctggttgtggaggaaatcttcaatccagatattggtatgttcacatacgatgaatctacaaaattgttttggtttaatccatcttcttttgaaactgagggtcagtttactctgattggcatagtactgggtctggctatttacaataactgtatactggatgtacattttcccatggttgtctacaggaagctaatggggaaaaaaggaacttttcgtgacttgggagactctcacccagttctatatcagagtttaaaagatttattggagtatgaagggaatgtggaagatgacatgatgatcactttccagatatcacagacagatctttttggtaacccaatgatgtatgatctaaaggaaaatggtgataaaattccaattacaaatgaaaacaggaaggaatttgtcaatctttattctgactacattctcaataaatcagtagaaaaacagttcaaggcttttcggagaggttttcatatggtgaccaatgaatctcccttaaagtacttattcagaccagaagaaattgaattgcttatatgtggaagccggaatctagatttccaagcactagaagaaactacagaatatgacggtggctataccagggactctgttctgattagggagttctgggaaatcgttcattcatttacagatgaacagaaaagactcttcttgcagtttacaacgggcacagacagagcacctgtgggaggactaggaaaattaaagatgattatagccaaaaatggcccagacacagaaaggttacctacatctcatacttgctttaatgtgcttttacttccggaatactcaagcaaagaaaaacttaaagagagattgttgaaggccatcacgtatgccaaaggatttggcatgctgtaa

SEQ ID NO: 1553 - DNA, 1494 bp, synthetic construct
  source 1..1494: mol_type = other DNA; note = NLS-VL12.3-(GS)6-E6AP nucleic acid
ccggcggcgaaacgcgtgaaactggatggcagcggcagcggcagcggcagccaacctgtgctgacacagagccccagcgtgtccgccgctcctcggcagcgggtgaccatcagcgtgtccggctctaatagcaacatcggctccaacaccgtgaactggatccagcagctgcctggaagagcccccgagctgctgatgtacgacgacgacctgctcgccccaggcgtgtctgatagattcagcggctctagaagcggcaccagcgccagcctgaccatcagcggactgcagtctgaagatgaggccgactactacgccgctacatgggacgatagcctgaacggctgggtgttcggcggcggaacaaaggtgaccgtcctgagcggcggcagcggcagcggcagcggcagcggcagcggcagcaatccatatttgagactcaaagttagacgtgaccatatcatagatgatgcacttgtccggctagagatgatcgctatggaaaatcctgcagacttgaagaagcagttgtatgtggaatttgaaggagaacaaggagttgatgagggaggtgtttccaaagaattttttcagctggttgtggaggaaatcttcaatccagatattggtatgttcacatacgatgaatctacaaaattgttttggtttaatccatcttcttttgaaactgagggtcagtttactctgattggcatagtactgggtctggctatttacaataactgtatactggatgtacattttcccatggttgtctacaggaagctaatggggaaaaaaggaacttttcgtgacttgggagactctcacccagttctatatcagagtttaaaagatttattggagtatgaagggaatgtggaagatgacatgatgatcactttccagatatcacagacagatctttttggtaacccaatgatgtatgatctaaaggaaaatggtgataaaattccaattacaaatgaaaacaggaaggaatttgtcaatctttattctgactacattctcaataaatcagtagaaaaacagttcaaggcttttcggagaggttttcatatggtgaccaatgaatctcccttaaagtacttattcagaccagaagaaattgaattgcttatatgtggaagccggaatctagatttccaagcactagaagaaactacagaatatgacggtggctataccagggactctgttctgattagggagttctgggaaatcgttcattcatttacagatgaacagaaaagactcttcttgcagtttacaacgggcacagacagagcacctgtgggaggactaggaaaattaaagatgattatagccaaaaatggcccagacacagaaaggttacctacatctcatacttgctttaatgtgcttttacttccggaatactcaagcaaagaaaaacttaaagagagattgttgaaggccatcacgtatgccaaaggatttggcatgctgtaa

SEQ ID NO: 1554 - DNA, 1494 bp, synthetic construct
  source 1..1494: mol_type = other DNA; note = HA-NLS-VL12.3-(GS)1-E6AP nucleic acid
atgtacccatacgatgttccagattacgctccggcggcgaaacgcgtgaaactggatggcagcggcagcggcagcggcagccaacctgtgctgacacagagccccagcgtgtccgccgctcctcggcagcgggtgaccatcagcgtgtccggctctaatagcaacatcggctccaacaccgtgaactggatccagcagctgcctggaagagcccccgagctgctgatgtacgacgacgacctgctcgccccaggcgtgtctgatagattcagcggctctagaagcggcaccagcgccagcctgaccatcagcggactgcagtctgaagatgaggccgactactacgccgctacatgggacgatagcctgaacggctgggtgttcggcggcggaacaaaggtgaccgtcctgagcggcggcagcaatccatatttgagactcaaagttagacgtgaccatatcatagatgatgcacttgtccggctagagatgatcgctatggaaaatcctgcagacttgaagaagcagttgtatgtggaatttgaaggagaacaaggagttgatgagggaggtgtttccaaagaattttttcagctggttgtggaggaaatcttcaatccagatattggtatgttcacatacgatgaatctacaaaattgttttggtttaatccatcttcttttgaaactgagggtcagtttactctgattggcatagtactgggtctggctatttacaataactgtatactggatgtacattttcccatggttgtctacaggaagctaatggggaaaaaaggaacttttcgtgacttgggagactctcacccagttctatatcagagtttaaaagatttattggagtatgaagggaatgtggaagatgacatgatgatcactttccagatatcacagacagatctttttggtaacccaatgatgtatgatctaaaggaaaatggtgataaaattccaattacaaatgaaaacaggaaggaatttgtcaatctttattctgactacattctcaataaatcagtagaaaaacagttcaaggcttttcggagaggttttcatatggtgaccaatgaatctcccttaaagtacttattcagaccagaagaaattgaattgcttatatgtggaagccggaatctagatttccaagcactagaagaaactacagaatatgacggtggctataccagggactctgttctgattagggagttctgggaaatcgttcattcatttacagatgaacagaaaagactcttcttgcagtttacaacgggcacagacagagcacctgtgggaggactaggaaaattaaagatgattatagccaaaaatggcccagacacagaaaggttacctacatctcatacttgctttaatgtgcttttacttccggaatactcaagcaaagaaaaacttaaagagagattgttgaaggccatcacgtatgccaaaggatttggcatgctgtaa

SEQ ID NO: 1555 - DNA, 1500 bp, synthetic construct
  source 1..1500: mol_type = other DNA; note = HA-NLS-VL12.3-(GS)2-E6AP nucleic acid
atgtacccatacgatgttccagattacgctccggcggcgaaacgcgtgaaactggatggcagcggcagcggcagcggcagccaacctgtgctgacacagagccccagcgtgtccgccgctcctcggcagcgggtgaccatcagcgtgtccggctctaatagcaacatcggctccaacaccgtgaactggatccagcagctgcctggaagagcccccgagctgctgatgtacgacgacgacctgctcgccccaggcgtgtctgatagattcagcggctctagaagcggcaccagcgccagcctgaccatcagcggactgcagtctgaagatgaggccgactactacgccgctacatgggacgatagcctgaacggctgggtgttcggcggcggaacaaaggtgaccgtcctgagcggcggcagcggcagcaatccatatttgagactcaaagttagacgtgaccatatcatagatgatgcacttgtccggctagagatgatcgctatggaaaatcctgcagacttgaagaagcagttgtatgtggaatttgaaggagaacaaggagttgatgagggaggtgtttccaaagaattttttcagctggttgtggaggaaatcttcaatccagatattggtatgttcacatacgatgaatctacaaaattgttttggtttaatccatcttcttttgaaactgagggtcagtttactctgattggcatagtactgggtctggctatttacaataactgtatactggatgtacattttcccatggttgtctacaggaagctaatggggaaaaaaggaacttttcgtgacttgggagactctcacccagttctatatcagagtttaaaagatttattggagtatgaagggaatgtggaagatgacatgatgatcactttccagatatcacagacagatctttttggtaacccaatgatgtatgatctaaaggaaaatggtgataaaattccaattacaaatgaaaacaggaaggaatttgtcaatctttattctgactacattctcaataaatcagtagaaaaacagttcaaggcttttcggagaggttttcatatggtgaccaatgaatctcccttaaagtacttattcagaccagaagaaattgaattgcttatatgtggaagccggaatctagatttccaagcactagaagaaactacagaatatgacggtggctataccagggactctgttctgattagggagttctgggaaatcgttcattcatttacagatgaacagaaaagactcttcttgcagtttacaacgggcacagacagagcacctgtgggaggactaggaaaattaaagatgattatagccaaaaatggcccagacacagaaaggttacctacatctcatacttgctttaatgtgcttttacttccggaatactcaagcaaagaaaaacttaaagagagattgttgaaggccatcacgtatgccaaaggatttggcatgctgtaa

SEQ ID NO: 1556 - DNA, 1506 bp, synthetic construct
  source 1..1506: mol_type = other DNA; note = HA-NLS-VL12.3-(GS)3-E6AP nucleic acid
atgtacccatacgatgttccagattacgctccggcggcgaaacgcgtgaaactggatggcagcggcagcggcagcggcagccaacctgtgctgacacagagccccagcgtgtccgccgctcctcggcagcgggtgaccatcagcgtgtccggctctaatagcaacatcggctccaacaccgtgaactggatccagcagctgcctggaagagcccccgagctgctgatgtacgacgacgacctgctcgccccaggcgtgtctgatagattcagcggctctagaagcggcaccagcgccagcctgaccatcagcggactgcagtctgaagatgaggccgactactacgccgctacatgggacgatagcctgaacggctgggtgttcggcggcggaacaaaggtgaccgtcctgagcggcggcagcggcagcggcagcaatccatatttgagactcaaagttagacgtgaccatatcatagatgatgcacttgtccggctagagatgatcgctatggaaaatcctgcagacttgaagaagcagttgtatgtggaatttgaaggagaacaaggagttgatgagggaggtgtttccaaagaattttttcagctggttgtggaggaaatcttcaatccagatattggtatgttcacatacgatgaatctacaaaattgttttggtttaatccatcttcttttgaaactgagggtcagtttactctgattggcatagtactgggtctggctatttacaataactgtatactggatgtacattttcccatggttgtctacaggaagctaatggggaaaaaaggaacttttcgtgacttgggagactctcacccagttctatatcagagtttaaaagatttattggagtatgaagggaatgtggaagatgacatgatgatcactttccagatatcacagacagatctttttggtaacccaatgatgtatgatctaaaggaaaatggtgataaaattccaattacaaatgaaaacaggaaggaatttgtcaatctttattctgactacattctcaataaatcagtagaaaaacagttcaaggcttttcggagaggttttcatatggtgaccaatgaatctcccttaaagtacttattcagaccagaagaaattgaattgcttatatgtggaagccggaatctagatttccaagcactagaagaaactacagaatatgacggtggctataccagggactctgttctgattagggagttctgggaaatcgttcattcatttacagatgaacagaaaagactcttcttgcagtttacaacgggcacagacagagcacctgtgggaggactaggaaaattaaagatgattatagccaaaaatggcccagacacagaaaggttacctacatctcatacttgctttaatgtgcttttacttccggaatactcaagcaaagaaaaacttaaagagagattgttgaaggccatcacgtatgccaaaggatttggcatgctgtaa

SEQ ID NO: 1557 - DNA, 1512 bp, synthetic construct
  source 1..1512: mol_type = other DNA; note = HA-NLS-VL12.3-(GS)4-E6AP nucleic acid
atgtacccatacgatgttccagattacgctccggcggcgaaacgcgtgaaactggatggcagcggcagcggcagcggcagccaacctgtgctgacacagagccccagcgtgtccgccgctcctcggcagcgggtgaccatcagcgtgtccggctctaatagcaacatcggctccaacaccgtgaactggatccagcagctgcctggaagagcccccgagctgctgatgtacgacgacgacctgctcgccccaggcgtgtctgatagattcagcggctctagaagcggcaccagcgccagcctgaccatcagcggactgcagtctgaagatgaggccgactactacgccgctacatgggacgatagcctgaacggctgggtgttcggcggcggaacaaaggtgaccgtcctgagcggcggcagcggcagcggcagcggcagcaatccatatttgagactcaaagttagacgtgaccatatcatagatgatgcacttgtccggctagagatgatcgctatggaaaatcctgcagacttgaagaagcagttgtatgtggaatttgaaggagaacaaggagttgatgagggaggtgtttccaaagaattttttcagctggttgtggaggaaatcttcaatccagatattggtatgttcacatacgatgaatctacaaaattgttttggtttaatccatcttcttttgaaactgagggtcagtttactctgattggcatagtactgggtctggctatttacaataactgtatactggatgtacattttcccatggttgtctacaggaagctaatggggaaaaaaggaacttttcgtgacttgggagactctcacccagttctatatcagagtttaaaagatttattggagtatgaagggaatgtggaagatgacatgatgatcactttccagatatcacagacagatctttttggtaacccaatgatgtatgatctaaaggaaaatggtgataaaattccaattacaaatgaaaacaggaaggaatttgtcaatctttattctgactacattctcaataaatcagtagaaaaacagttcaaggcttttcggagaggttttcatatggtgaccaatgaatctcccttaaagtacttattcagaccagaagaaattgaattgcttatatgtggaagccggaatctagatttccaagcactagaagaaactacagaatatgacggtggctataccagggactctgttctgattagggagttctgggaaatcgttcattcatttacagatgaacagaaaagactcttcttgcagtttacaacgggcacagacagagcacctgtgggaggactaggaaaattaaagatgattatagccaaaaatggcccagacacagaaaggttacctacatctcatacttgctttaatgtgcttttacttccggaatactcaagcaaagaaaaacttaaagagagattgttgaaggccatcacgtatgccaaaggatttggcatgctgtaa

SEQ ID NO: 1558 - DNA, 1518 bp, synthetic construct
  source 1..1518: mol_type = other DNA; note = HA-NLS-VL12.3-(GS)5-E6AP nucleic acid
atgtacccatacgatgttccagattacgctccggcggcgaaacgcgtgaaactggatggcagcggcagcggcagcggcagccaacctgtgctgacacagagccccagcgtgtccgccgctcctcggcagcgggtgaccatcagcgtgtccggctctaatagcaacatcggctccaacaccgtgaactggatccagcagctgcctggaagagcccccgagctgctgatgtacgacgacgacctgctcgccccaggcgtgtctgatagattcagcggctctagaagcggcaccagcgccagcctgaccatcagcggactgcagtctgaagatgaggccgactactacgccgctacatgggacgatagcctgaacggctgggtgttcggcggcggaacaaaggtgaccgtcctgagcggcggcagcggcagcggcagcggcagcggcagcaatccatatttgagactcaaagttagacgtgaccatatcatagatgatgcacttgtccggctagagatgatcgctatggaaaatcctgcagacttgaagaagcagttgtatgtggaatttgaaggagaacaaggagttgatgagggaggtgtttccaaagaattttttcagctggttgtggaggaaatcttcaatccagatattggtatgttcacatacgatgaatctacaaaattgttttggtttaatccatcttcttttgaaactgagggtcagtttactctgattggcatagtactgggtctggctatttacaataactgtatactggatgtacattttcccatggttgtctacaggaagctaatggggaaaaaaggaacttttcgtgacttgggagactctcacccagttctatatcagagtttaaaagatttattggagtatgaagggaatgtggaagatgacatgatgatcactttccagatatcacagacagatctttttggtaacccaatgatgtatgatctaaaggaaaatggtgataaaattccaattacaaatgaaaacaggaaggaatttgtcaatctttattctgactacattctcaataaatcagtagaaaaacagttcaaggcttttcggagaggttttcatatggtgaccaatgaatctcccttaaagtacttattcagaccagaagaaattgaattgcttatatgtggaagccggaatctagatttccaagcactagaagaaactacagaatatgacggtggctataccagggactctgttctgattagggagttctgggaaatcgttcattcatttacagatgaacagaaaagactcttcttgcagtttacaacgggcacagacagagcacctgtgggaggactaggaaaattaaagatgattatagccaaaaatggcccagacacagaaaggttacctacatctcatacttgctttaatgtgcttttacttccggaatactcaagcaaagaaaaacttaaagagagattgttgaaggccatcacgtatgccaaaggatttggcatgctgtaa

SEQ ID NO: 1559 - DNA, 1524 bp, synthetic construct
  source 1..1524: mol_type = other DNA; note = HA-NLS-VL12.3-(GS)6-E6AP nucleic acid
atgtacccatacgatgttccagattacgctccggcggcgaaacgcgtgaaactggatggcagcggcagcggcagcggcagccaacctgtgctgacacagagccccagcgtgtccgccgctcctcggcagcgggtgaccatcagcgtgtccggctctaatagcaacatcggctccaacaccgtgaactggatccagcagctgcctggaagagcccccgagctgctgatgtacgacgacgacctgctcgccccaggcgtgtctgatagattcagcggctctagaagcggcaccagcgccagcctgaccatcagcggactgcagtctgaagatgaggccgactactacgccgctacatgggacgatagcctgaacggctgggtgttcggcggcggaacaaaggtgaccgtcctgagcggcggcagcggcagcggcagcggcagcggcagcggcagcaatccatatttgagactcaaagttagacgtgaccatatcatagatgatgcacttgtccggctagagatgatcgctatggaaaatcctgcagacttgaagaagcagttgtatgtggaatttgaaggagaacaaggagttgatgagggaggtgtttccaaagaattttttcagctggttgtggaggaaatcttcaatccagatattggtatgttcacatacgatgaatctacaaaattgttttggtttaatccatcttcttttgaaactgagggtcagtttactctgattggcatagtactgggtctggctatttacaataactgtatactggatgtacattttcccatggttgtctacaggaagctaatggggaaaaaaggaacttttcgtgacttgggagactctcacccagttctatatcagagtttaaaagatttattggagtatgaagggaatgtggaagatgacatgatgatcactttccagatatcacagacagatctttttggtaacccaatgatgtatgatctaaaggaaaatggtgataaaattccaattacaaatgaaaacaggaaggaatttgtcaatctttattctgactacattctcaataaatcagtagaaaaacagttcaaggcttttcggagaggttttcatatggtgaccaatgaatctcccttaaagtacttattcagaccagaagaaattgaattgcttatatgtggaagccggaatctagatttccaagcactagaagaaactacagaatatgacggtggctataccagggactctgttctgattagggagttctgggaaatcgttcattcatttacagatgaacagaaaagactcttcttgcagtttacaacgggcacagacagagcacctgtgggaggactaggaaaattaaagatgattatagccaaaaatggcccagacacagaaaggttacctacatctcatacttgctttaatgtgcttttacttccggaatactcaagcaaagaaaaacttaaagagagattgttgaaggccatcacgtatgccaaaggatttggcatgctgtaa

SEQ ID NO: 1560 - DNA, 1452 bp, synthetic construct
  source 1..1452: mol_type = other DNA; note = FBXW7a-(GS)1-VL12.3 nucleic acid
aatcaggaactgctctctgtgggcagcaaaagacgacgaactggaggctctctgagaggtaacccttcctcaagccaggtagatgaagaacagatgaatcgtgtggtagaggaggaacagcaacagcaactcagacaacaagaggaggagcacactgcaaggaatggtgaagttgttggagtagaacctagacctggaggccaaaatgattcccagcaaggacagttggaagaaaacaataatagatttatttcggtagatgaggactcctcaggaaaccaagaagaacaagaggaagatgaagaacatgctggtgaacaagatgaggaggatgaggaggaggaggagatggaccaggagagtgacgattttgatcagtctgatgatagtagcagagaagatgaacatacacatactaacagtgtcacgaactccagtagtattgtggacctgcccgttcaccaactctcctccccattctatacaaaaacaacaaaaatgaaaagaaagttggaccatggttctgaggtccgctctttttctttgggaaagaaaccatgcaaagtctcagaatatacaagtaccactgggcttgtaccatgttcagcaacaccaacaacttttggggacctcagagcagccaatggccaagggcaacaacgacgccgaattacatctgtccagccacctacaggcctccaggaatggctaaaaatgtttcagagctggagtggaccagagaaattgcttgctttagatgaactcattgatagttgtgaaccaacacaagtaaaacatatgatgcaagtgatagaaccccagtttcaacgagacttcatttcattgctccctaaagagttggcactctatgtgctttcattcctggaacccaaagacctgctacaagcagctcagacatgtcgctactggagaattttggctgaagacaaccttctctggagagagaaatgcaaagaagaggggattgatgaaccattgcacatcaagagaagaaaagtaataaaaccaggtttcatacacagtccatggaaaagtgcatacatcagacagcacagaattgatactaactcgaggcgaggaggcagcggcagccaacctgtgctgacacagagccccagcgtgtccgccgctcctcggcagcgggtgaccatcagcgtgtccggctctaatagcaacatcggctccaacaccgtgaactggatccagcagctgcctggaagagcccccgagctgctgatgtacgacgacgacctgctcgccccaggcgtgtctgatagattcagcggctctagaagcggcaccagcgccagcctgaccatcagcggactgcagtctgaagatgaggccgactactacgccgctacatgggacgatagcctgaacggctgggtgttcggcggcggaacaaaggtgaccgtcctgagcggctaa

SEQ ID NO: 1561 - DNA, 1458 bp, synthetic construct
  source 1..1458: mol_type = other DNA; note = FBXW7a-(GS)2-VL12.3 nucleic acid
aatcaggaactgctctctgtgggcagcaaaagacgacgaactggaggctctctgagaggtaacccttcctcaagccaggtagatgaagaacagatgaatcgtgtggtagaggaggaacagcaacagcaactcagacaacaagaggaggagcacactgcaaggaatggtgaagttgttggagtagaacctagacctggaggccaaaatgattcccagcaaggacagttggaagaaaacaataatagatttatttcggtagatgaggactcctcaggaaaccaagaagaacaagaggaagatgaagaacatgctggtgaacaagatgaggaggatgaggaggaggaggagatggaccaggagagtgacgattttgatcagtctgatgatagtagcagagaagatgaacatacacatactaacagtgtcacgaactccagtagtattgtggacctgcccgttcaccaactctcctccccattctatacaaaaacaacaaaaatgaaaagaaagttggaccatggttctgaggtccgctctttttctttgggaaagaaaccatgcaaagtctcagaatatacaagtaccactgggcttgtaccatgttcagcaacaccaacaacttttggggacctcagagcagccaatggccaagggcaacaacgacgccgaattacatctgtccagccacctacaggcctccaggaatggctaaaaatgtttcagagctggagtggaccagagaaattgcttgctttagatgaactcattgatagttgtgaaccaacacaagtaaaacatatgatgcaagtgatagaaccccagtttcaacgagacttcatttcattgctccctaaagagttggcactctatgtgctttcattcctggaacccaaagacctgctacaagcagctcagacatgtcgctactggagaattttggctgaagacaaccttctctggagagagaaatgcaaagaagaggggattgatgaaccattgcacatcaagagaagaaaagtaataaaaccaggtttcatacacagtccatggaaaagtgcatacatcagacagcacagaattgatactaactcgaggcgaggaggcagcggcagcggcagccaacctgtgctgacacagagccccagcgtgtccgccgctcctcggcagcgggtgaccatcagcgtgtccggctctaatagcaacatcggctccaacaccgtgaactggatccagcagctgcctggaagagcccccgagctgctgatgtacgacgacgacctgctcgccccaggcgtgtctgatagattcagcggctctagaagcggcaccagcgccagcctgaccatcagcggactgcagtctgaagatgaggccgactactacgccgctacatgggacgatagcctgaacggctgggtgttcggcggcggaacaaaggtgaccgtcctgagcggctaa

SEQ ID NO: 1562 - DNA, 1464 bp, synthetic construct
  source 1..1464: mol_type = other DNA; note = FBXW7a-(GS)3-VL12.3 nucleic acid
aatcaggaactgctctctgtgggcagcaaaagacgacgaactggaggctctctgagaggtaacccttcctcaagccaggtagatgaagaacagatgaatcgtgtggtagaggaggaacagcaacagcaactcagacaacaagaggaggagcacactgcaaggaatggtgaagttgttggagtagaacctagacctggaggccaaaatgattcccagcaaggacagttggaagaaaacaataatagatttatttcggtagatgaggactcctcaggaaaccaagaagaacaagaggaagatgaagaacatgctggtgaacaagatgaggaggatgaggaggaggaggagatggaccaggagagtgacgattttgatcagtctgatgatagtagcagagaagatgaacatacacatactaacagtgtcacgaactccagtagtattgtggacctgcccgttcaccaactctcctccccattctatacaaaaacaacaaaaatgaaaagaaagttggaccatggttctgaggtccgctctttttctttgggaaagaaaccatgcaaagtctcagaatatacaagtaccactgggcttgtaccatgttcagcaacaccaacaacttttggggacctcagagcagccaatggccaagggcaacaacgacgccgaattacatctgtccagccacctacaggcctccaggaatggctaaaaatgtttcagagctggagtggaccagagaaattgcttgctttagatgaactcattgatagttgtgaaccaacacaagtaaaacatatgatgcaagtgatagaaccccagtttcaacgagacttcatttcattgctccctaaagagttggcactctatgtgctttcattcctggaacccaaagacctgctacaagcagctcagacatgtcgctactggagaattttggctgaagacaaccttctctggagagagaaatgcaaagaagaggggattgatgaaccattgcacatcaagagaagaaaagtaataaaaccaggtttcatacacagtccatggaaaagtgcatacatcagacagcacagaattgatactaactcgaggcgaggaggcagcggcagcggcagcggcagccaacctgtgctgacacagagccccagcgtgtccgccgctcctcggcagcgggtgaccatcagcgtgtccggctctaatagcaacatcggctccaacaccgtgaactggatccagcagctgcctggaagagcccccgagctgctgatgtacgacgacgacctgctcgccccaggcgtgtctgatagattcagcggctctagaagcggcaccagcgccagcctgaccatcagcggactgcagtctgaagatgaggccgactactacgccgctacatgggacgatagcctgaacggctgggtgttcggcggcggaacaaaggtgaccgtcctgagcggctaa

SEQ ID NO: 1563 - DNA, 1470 bp, synthetic construct
  source 1..1470: mol_type = other DNA; note = FBXW7a-(GS)4-VL12.3 nucleic acid
aatcaggaactgctctctgtgggcagcaaaagacgacgaactggaggctctctgagaggtaacccttcctcaagccaggtagatgaagaacagatgaatcgtgtggtagaggaggaacagcaacagcaactcagacaacaagaggaggagcacactgcaaggaatggtgaagttgttggagtagaacctagacctggaggccaaaatgattcccagcaaggacagttggaagaaaacaataatagatttatttcggtagatgaggactcctcaggaaaccaagaagaacaagaggaagatgaagaacatgctggtgaacaagatgaggaggatgaggaggaggaggagatggaccaggagagtgacgattttgatcagtctgatgatagtagcagagaagatgaacatacacatactaacagtgtcacgaactccagtagtattgtggacctgcccgttcaccaactctcctccccattctatacaaaaacaacaaaaatgaaaagaaagttggaccatggttctgaggtccgctctttttctttgggaaagaaaccatgcaaagtctcagaatatacaagtaccactgggcttgtaccatgttcagcaacaccaacaacttttggggacctcagagcagccaatggccaagggcaacaacgacgccgaattacatctgtccagccacctacaggcctccaggaatggctaaaaatgtttcagagctggagtggaccagagaaattgcttgctttagatgaactcattgatagttgtgaaccaacacaagtaaaacatatgatgcaagtgatagaaccccagtttcaacgagacttcatttcattgctccctaaagagttggcactctatgtgctttcattcctggaacccaaagacctgctacaagcagctcagacatgtcgctactggagaattttggctgaagacaaccttctctggagagagaaatgcaaagaagaggggattgatgaaccattgcacatcaagagaagaaaagtaataaaaccaggtttcatacacagtccatggaaaagtgcatacatcagacagcacagaattgatactaactcgaggcgaggaggcagcggcagcggcagcggcagcggcagccaacctgtgctgacacagagccccagcgtgtccgccgctcctcggcagcgggtgaccatcagcgtgtccggctctaatagcaacatcggctccaacaccgtgaactggatccagcagctgcctggaagagcccccgagctgctgatgtacgacgacgacctgctcgccccaggcgtgtctgatagattcagcggctctagaagcggcaccagcgccagcctgaccatcagcggactgcagtctgaagatgaggccgactactacgccgctacatgggacgatagcctgaacggctgggtgttcggcggcggaacaaaggtgaccgtcctgagcggctaa

SEQ ID NO: 1564 - DNA, 1476 bp, synthetic construct
  source 1..1476: mol_type = other DNA; note = FBXW7a-(GS)5-VL12.3 nucleic acid
aatcaggaactgctctctgtgggcagcaaaagacgacgaactggaggctctctgagaggtaacccttcctcaagccaggtagatgaagaacagatgaatcgtgtggtagaggaggaacagcaacagcaactcagacaacaagaggaggagcacactgcaaggaatggtgaagttgttggagtagaacctagacctggaggccaaaatgattcccagcaaggacagttggaagaaaacaataatagatttatttcggtagatgaggactcctcaggaaaccaagaagaacaagaggaagatgaagaacatgctggtgaacaagatgaggaggatgaggaggaggaggagatggaccaggagagtgacgattttgatcagtctgatgatagtagcagagaagatgaacatacacatactaacagtgtcacgaactccagtagtattgtggacctgcccgttcaccaactctcctccccattctatacaaaaacaacaaaaatgaaaagaaagttggaccatggttctgaggtccgctctttttctttgggaaagaaaccatgcaaagtctcagaatatacaagtaccactgggcttgtaccatgttcagcaacaccaacaacttttggggacctcagagcagccaatggccaagggcaacaacgacgccgaattacatctgtccagccacctacaggcctccaggaatggctaaaaatgtttcagagctggagtggaccagagaaattgcttgctttagatgaactcattgatagttgtgaaccaacacaagtaaaacatatgatgcaagtgatagaaccccagtttcaacgagacttcatttcattgctccctaaagagttggcactctatgtgctttcattcctggaacccaaagacctgctacaagcagctcagacatgtcgctactggagaattttggctgaagacaaccttctctggagagagaaatgcaaagaagaggggattgatgaaccattgcacatcaagagaagaaaagtaataaaaccaggtttcatacacagtccatggaaaagtgcatacatcagacagcacagaattgatactaactcgaggcgaggaggcagcggcagcggcagcggcagcggcagcggcagccaacctgtgctgacacagagccccagcgtgtccgccgctcctcggcagcgggtgaccatcagcgtgtccggctctaatagcaacatcggctccaacaccgtgaactggatccagcagctgcctggaagagcccccgagctgctgatgtacgacgacgacctgctcgccccaggcgtgtctgatagattcagcggctctagaagcggcaccagcgccagcctgaccatcagcggactgcagtctgaagatgaggccgactactacgccgctacatgggacgatagcctgaacggctgggtgttcggcggcggaacaaaggtgaccgtcctgagcggctaa

SEQ ID NO: 1565 - DNA, 1482 bp, synthetic construct
  source 1..1482: mol_type = other DNA; note = FBXW7a-(GS)6-VL12.3 nucleic acid
aatcaggaactgctctctgtgggcagcaaaagacgacgaactggaggctctctgagaggtaacccttcctcaagccaggtagatgaagaacagatgaatcgtgtggtagaggaggaacagcaacagcaactcagacaacaagaggaggagcacactgcaaggaatggtgaagttgttggagtagaacctagacctggaggccaaaatgattcccagcaaggacagttggaagaaaacaataatagatttatttcggtagatgaggactcctcaggaaaccaagaagaacaagaggaagatgaagaacatgctggtgaacaagatgaggaggatgaggaggaggaggagatggaccaggagagtgacgattttgatcagtctgatgatagtagcagagaagatgaacatacacatactaacagtgtcacgaactccagtagtattgtggacctgcccgttcaccaactctcctccccattctatacaaaaacaacaaaaatgaaaagaaagttggaccatggttctgaggtccgctctttttctttgggaaagaaaccatgcaaagtctcagaatatacaagtaccactgggcttgtaccatgttcagcaacaccaacaacttttggggacctcagagcagccaatggccaagggcaacaacgacgccgaattacatctgtccagccacctacaggcctccaggaatggctaaaaatgtttcagagctggagtggaccagagaaattgcttgctttagatgaactcattgatagttgtgaaccaacacaagtaaaacatatgatgcaagtgatagaaccccagtttcaacgagacttcatttcattgctccctaaagagttggcactctatgtgctttcattcctggaacccaaagacctgctacaagcagctcagacatgtcgctactggagaattttggctgaagacaaccttctctggagagagaaatgcaaagaagaggggattgatgaaccattgcacatcaagagaagaaaagtaataaaaccaggtttcatacacagtccatggaaaagtgcatacatcagacagcacagaattgatactaactcgaggcgaggaggcagcggcagcggcagcggcagcggcagcggcagcggcagccaacctgtgctgacacagagccccagcgtgtccgccgctcctcggcagcgggtgaccatcagcgtgtccggctctaatagcaacatcggctccaacaccgtgaactggatccagcagctgcctggaagagcccccgagctgctgatgtacgacgacgacctgctcgccccaggcgtgtctgatagattcagcggctctagaagcggcaccagcgccagcctgaccatcagcggactgcagtctgaagatgaggccgactactacgccgctacatgggacgatagcctgaacggctgggtgttcggcggcggaacaaaggtgaccgtcctgagcggctaa

SEQ ID NO: 1566 - DNA, 1482 bp, synthetic construct
  source 1..1482: mol_type = other DNA; note = HA-FBXW7a-(GS)1-VL12.3 nucleic acid
atgtacccatacgatgttccagattacgctaatcaggaactgctctctgtgggcagcaaaagacgacgaactggaggctctctgagaggtaacccttcctcaagccaggtagatgaagaacagatgaatcgtgtggtagaggaggaacagcaacagcaactcagacaacaagaggaggagcacactgcaaggaatggtgaagttgttggagtagaacctagacctggaggccaaaatgattcccagcaaggacagttggaagaaaacaataatagatttatttcggtagatgaggactcctcaggaaaccaagaagaacaagaggaagatgaagaacatgctggtgaacaagatgaggaggatgaggaggaggaggagatggaccaggagagtgacgattttgatcagtctgatgatagtagcagagaagatgaacatacacatactaacagtgtcacgaactccagtagtattgtggacctgcccgttcaccaactctcctccccattctatacaaaaacaacaaaaatgaaaagaaagttggaccatggttctgaggtccgctctttttctttgggaaagaaaccatgcaaagtctcagaatatacaagtaccactgggcttgtaccatgttcagcaacaccaacaacttttggggacctcagagcagccaatggccaagggcaacaacgacgccgaattacatctgtccagccacctacaggcctccaggaatggctaaaaatgtttcagagctggagtggaccagagaaattgcttgctttagatgaactcattgatagttgtgaaccaacacaagtaaaacatatgatgcaagtgatagaaccccagtttcaacgagacttcatttcattgctccctaaagagttggcactctatgtgctttcattcctggaacccaaagacctgctacaagcagctcagacatgtcgctactggagaattttggctgaagacaaccttctctggagagagaaatgcaaagaagaggggattgatgaaccattgcacatcaagagaagaaaagtaataaaaccaggtttcatacacagtccatggaaaagtgcatacatcagacagcacagaattgatactaactcgaggcgaggaggcagcggcagccaacctgtgctgacacagagccccagcgtgtccgccgctcctcggcagcgggtgaccatcagcgtgtccggctctaatagcaacatcggctccaacaccgtgaactggatccagcagctgcctggaagagcccccgagctgctgatgtacgacgacgacctgctcgccccaggcgtgtctgatagattcagcggctctagaagcggcaccagcgccagcctgaccatcagcggactgcagtctgaagatgaggccgactactacgccgctacatgggacgatagcctgaacggctgggtgttcggcggcggaacaaaggtgaccgtcctgagcggctaa

SEQ ID NO: 1567 - DNA, 1488 bp, synthetic construct
  source 1..1488: mol_type = other DNA; note = HA-FBXW7a-(GS)2-VL12.3 nucleic acid
atgtacccatacgatgttccagattacgctaatcaggaactgctctctgtgggcagcaaaagacgacgaactggaggctctctgagaggtaacccttcctcaagccaggtagatgaagaacagatgaatcgtgtggtagaggaggaacagcaacagcaactcagacaacaagaggaggagcacactgcaaggaatggtgaagttgttggagtagaacctagacctggaggccaaaatgattcccagcaaggacagttggaagaaaacaataatagatttatttcggtagatgaggactcctcaggaaaccaagaagaacaagaggaagatgaagaacatgctggtgaacaagatgaggaggatgaggaggaggaggagatggaccaggagagtgacgattttgatcagtctgatgatagtagcagagaagatgaacatacacatactaacagtgtcacgaactccagtagtattgtggacctgcccgttcaccaactctcctccccattctatacaaaaacaacaaaaatgaaaagaaagttggaccatggttctgaggtccgctctttttctttgggaaagaaaccatgcaaagtctcagaatatacaagtaccactgggcttgtaccatgttcagcaacaccaacaacttttggggacctcagagcagccaatggccaagggcaacaacgacgccgaattacatctgtccagccacctacaggcctccaggaatggctaaaaatgtttcagagctggagtggaccagagaaattgcttgctttagatgaactcattgatagttgtgaaccaacacaagtaaaacatatgatgcaagtgatagaaccccagtttcaacgagacttcatttcattgctccctaaagagttggcactctatgtgctttcattcctggaacccaaagacctgctacaagcagctcagacatgtcgctactggagaattttggctgaagacaaccttctctggagagagaaatgcaaagaagaggggattgatgaaccattgcacatcaagagaagaaaagtaataaaaccaggtttcatacacagtccatggaaaagtgcatacatcagacagcacagaattgatactaactcgaggcgaggaggcagcggcagcggcagccaacctgtgctgacacagagccccagcgtgtccgccgctcctcggcagcgggtgaccatcagcgtgtccggctctaatagcaacatcggctccaacaccgtgaactggatccagcagctgcctggaagagcccccgagctgctgatgtacgacgacgacctgctcgccccaggcgtgtctgatagattcagcggctctagaagcggcaccagcgccagcctgaccatcagcggactgcagtctgaagatgaggccgactactacgccgctacatgggacgatagcctgaacggctgggtgttcggcggcggaacaaaggtgaccgtcctgagcggctaa

SEQ ID NO: 1568 - DNA, 1494 bp, synthetic construct
  source 1..1494: mol_type = other DNA; note = HA-FBXW7a-(GS)3-VL12.3 nucleic acid
atgtacccatacgatgttccagattacgctaatcaggaactgctctctgtgggcagcaaaagacgacgaactggaggctctctgagaggtaacccttcctcaagccaggtagatgaagaacagatgaatcgtgtggtagaggaggaacagcaacagcaactcagacaacaagaggaggagcacactgcaaggaatggtgaagttgttggagtagaacctagacctggaggccaaaatgattcccagcaaggacagttggaagaaaacaataatagatttatttcggtagatgaggactcctcaggaaaccaagaagaacaagaggaagatgaagaacatgctggtgaacaagatgaggaggatgaggaggaggaggagatggaccaggagagtgacgattttgatcagtctgatgatagtagcagagaagatgaacatacacatactaacagtgtcacgaactccagtagtattgtggacctgcccgttcaccaactctcctccccattctatacaaaaacaacaaaaatgaaaagaaagttggaccatggttctgaggtccgctctttttctttgggaaagaaaccatgcaaagtctcagaatatacaagtaccactgggcttgtaccatgttcagcaacaccaacaacttttggggacctcagagcagccaatggccaagggcaacaacgacgccgaattacatctgtccagccacctacaggcctccaggaatggctaaaaatgtttcagagctggagtggaccagagaaattgcttgctttagatgaactcattgatagttgtgaaccaacacaagtaaaacatatgatgcaagtgatagaaccccagtttcaacgagacttcatttcattgctccctaaagagttggcactctatgtgctttcattcctggaacccaaagacctgctacaagcagctcagacatgtcgctactggagaattttggctgaagacaaccttctctggagagagaaatgcaaagaagaggggattgatgaaccattgcacatcaagagaagaaaagtaataaaaccaggtttcatacacagtccatggaaaagtgcatacatcagacagcacagaattgatactaactcgaggcgaggaggcagcggcagcggcagcggcagccaacctgtgctgacacagagccccagcgtgtccgccgctcctcggcagcgggtgaccatcagcgtgtccggctctaatagcaacatcggctccaacaccgtgaactggatccagcagctgcctggaagagcccccgagctgctgatgtacgacgacgacctgctcgccccaggcgtgtctgatagattcagcggctctagaagcggcaccagcgccagcctgaccatcagcggactgcagtctgaagatgaggccgactactacgccgctacatgggacgatagcctgaacggctgggtgttcggcggcggaacaaaggtgaccgtcctgagcggctaa

SEQ ID NO: 1569 - DNA, 1500 bp, synthetic construct
  source 1..1500: mol_type = other DNA; note = HA-FBXW7a-(GS)4-VL12.3 nucleic acid
atgtacccatacgatgttccagattacgctaatcaggaactgctctctgtgggcagcaaaagacgacgaactggaggctctctgagaggtaacccttcctcaagccaggtagatgaagaacagatgaatcgtgtggtagaggaggaacagcaacagcaactcagacaacaagaggaggagcacactgcaaggaatggtgaagttgttggagtagaacctagacctggaggccaaaatgattcccagcaaggacagttggaagaaaacaataatagatttatttcggtagatgaggactcctcaggaaaccaagaagaacaagaggaagatgaagaacatgctggtgaacaagatgaggaggatgaggaggaggaggagatggaccaggagagtgacgattttgatcagtctgatgatagtagcagagaagatgaacatacacatactaacagtgtcacgaactccagtagtattgtggacctgcccgttcaccaactctcctccccattctatacaaaaacaacaaaaatgaaaagaaagttggaccatggttctgaggtccgctctttttctttgggaaagaaaccatgcaaagtctcagaatatacaagtaccactgggcttgtaccatgttcagcaacaccaacaacttttggggacctcagagcagccaatggccaagggcaacaacgacgccgaattacatctgtccagccacctacaggcctccaggaatggctaaaaatgtttcagagctggagtggaccagagaaattgcttgctttagatgaactcattgatagttgtgaaccaacacaagtaaaacatatgatgcaagtgatagaaccccagtttcaacgagacttcatttcattgctccctaaagagttggcactctatgtgctttcattcctggaacccaaagacctgctacaagcagctcagacatgtcgctactggagaattttggctgaagacaaccttctctggagagagaaatgcaaagaagaggggattgatgaaccattgcacatcaagagaagaaaagtaataaaaccaggtttcatacacagtccatggaaaagtgcatacatcagacagcacagaattgatactaactcgaggcgaggaggcagcggcagcggcagcggcagcggcagccaacctgtgctgacacagagccccagcgtgtccgccgctcctcggcagcgggtgaccatcagcgtgtccggctctaatagcaacatcggctccaacaccgtgaactggatccagcagctgcctggaagagcccccgagctgctgatgtacgacgacgacctgctcgccccaggcgtgtctgatagattcagcggctctagaagcggcaccagcgccagcctgaccatcagcggactgcagtctgaagatgaggccgactactacgccgctacatgggacgatagcctgaacggctgggtgttcggcggcggaacaaaggtgaccgtcctgagcggctaa

SEQ ID NO: 1570 - DNA, 1506 bp, synthetic construct
  source 1..1506: mol_type = other DNA; note = HA-FBXW7a-(GS)5-VL12.3 nucleic acid
atgtacccatacgatgttccagattacgctaatcaggaactgctctctgtgggcagcaaaagacgacgaactggaggctctctgagaggtaacccttcctcaagccaggtagatgaagaacagatgaatcgtgtggtagaggaggaacagcaacagcaactcagacaacaagaggaggagcacactgcaaggaatggtgaagttgttggagtagaacctagacctggaggccaaaatgattcccagcaaggacagttggaagaaaacaataatagatttatttcggtagatgaggactcctcaggaaaccaagaagaacaagaggaagatgaagaacatgctggtgaacaagatgaggaggatgaggaggaggaggagatggaccaggagagtgacgattttgatcagtctgatgatagtagcagagaagatgaacatacacatactaacagtgtcacgaactccagtagtattgtggacctgcccgttcaccaactctcctccccattctatacaaaaacaacaaaaatgaaaagaaagttggaccatggttctgaggtccgctctttttctttgggaaagaaaccatgcaaagtctcagaatatacaagtaccactgggcttgtaccatgttcagcaacaccaacaacttttggggacctcagagcagccaatggccaagggcaacaacgacgccgaattacatctgtccagccacctacaggcctccaggaatggctaaaaatgtttcagagctggagtggaccagagaaattgcttgctttagatgaactcattgatagttgtgaaccaacacaagtaaaacatatgatgcaagtgatagaaccccagtttcaacgagacttcatttcattgctccctaaagagttggcactctatgtgctttcattcctggaacccaaagacctgctacaagcagctcagacatgtcgctactggagaattttggctgaagacaaccttctctggagagagaaatgcaaagaagaggggattgatgaaccattgcacatcaagagaagaaaagtaataaaaccaggtttcatacacagtccatggaaaagtgcatacatcagacagcacagaattgatactaactcgaggcgaggaggcagcggcagcggcagcggcagcggcagcggcagccaacctgtgctgacacagagccccagcgtgtccgccgctcctcggcagcgggtgaccatcagcgtgtccggctctaatagcaacatcggctccaacaccgtgaactggatccagcagctgcctggaagagcccccgagctgctgatgtacgacgacgacctgctcgccccaggcgtgtctgatagattcagcggctctagaagcggcaccagcgccagcctgaccatcagcggactgcagtctgaagatgaggccgactactacgccgctacatgggacgatagcctgaacggctgggtgttcggcggcggaacaaaggtgaccgtcctgagcggctaa

SEQ ID NO: 1571 - DNA, 1512 bp, synthetic construct
  source 1..1512: mol_type = other DNA; note = HA-FBXW7a-(GS)6-VL12.3 nucleic acid
atgtacccatacgatgttccagattacgctaatcaggaactgctctctgtgggcagcaaaagacgacgaactggaggctctctgagaggtaacccttcctcaagccaggtagatgaagaacagatgaatcgtgtggtagaggaggaacagcaacagcaactcagacaacaagaggaggagcacactgcaaggaatggtgaagttgttggagtagaacctagacctggaggccaaaatgattcccagcaaggacagttggaagaaaacaataatagatttatttcggtagatgaggactcctcaggaaaccaagaagaacaagaggaagatgaagaacatgctggtgaacaagatgaggaggatgaggaggaggaggagatggaccaggagagtgacgattttgatcagtctgatgatagtagcagagaagatgaacatacacatactaacagtgtcacgaactccagtagtattgtggacctgcccgttcaccaactctcctccccattctatacaaaaacaacaaaaatgaaaagaaagttggaccatggttctgaggtccgctctttttctttgggaaagaaaccatgcaaagtctcagaatatacaagtaccactgggcttgtaccatgttcagcaacaccaacaacttttggggacctcagagcagccaatggccaagggcaacaacgacgccgaattacatctgtccagccacctacaggcctccaggaatggctaaaaatgtttcagagctggagtggaccagagaaattgcttgctttagatgaactcattgatagttgtgaaccaacacaagtaaaacatatgatgcaagtgatagaaccccagtttcaacgagacttcatttcattgctccctaaagagttggcactctatgtgctttcattcctggaacccaaagacctgctacaagcagctcagacatgtcgctactggagaattttggctgaagacaaccttctctggagagagaaatgcaaagaagaggggattgatgaaccattgcacatcaagagaagaaaagtaataaaaccaggtttcatacacagtccatggaaaagtgcatacatcagacagcacagaattgatactaactcgaggcgaggaggcagcggcagcggcagcggcagcggcagcggcagcggcagccaacctgtgctgacacagagccccagcgtgtccgccgctcctcggcagcgggtgaccatcagcgtgtccggctctaatagcaacatcggctccaacaccgtgaactggatccagcagctgcctggaagagcccccgagctgctgatgtacgacgacgacctgctcgccccaggcgtgtctgatagattcagcggctctagaagcggcaccagcgccagcctgaccatcagcggactgcagtctgaagatgaggccgactactacgccgctacatgggacgatagcctgaacggctgggtgttcggcggcggaacaaaggtgaccgtcctgagcggctaa

SEQ ID NO: 1572 - DNA, 1359 bp, synthetic construct
  source 1..1359: mol_type = other DNA; note = NLS-Keap1-(GS)1-VL12.3 nucleic acid
ccggcggcgaaacgcgtgaaactggatggcagcggcagcggcagccagccagatcccaggcctagcggggctggggcctgctgccgattcctgcccctgcagtcacagtgccctgagggggcaggggacgcggtgatgtacgcctccactgagtgcaaggcggaggtgacgccctcccagcatggcaaccgcaccttcagctacaccctggaggatcataccaagcaggcctttggcatcatgaacgagctgcggctcagccagcagctgtgtgacgtcacactgcaggtcaagtaccaggatgcaccggccgcccagttcatggcccacaaggtggtgctggcctcatccagccctgtcttcaaggccatgttcaccaacgggctgcgggagcagggcatggaggtggtgtccattgagggtatccaccccaaggtcatggagcgcctcattgaattcgcctacacggcctccatctccatgggcgagaagtgtgtcctccacgtcatgaacggtgctgtcatgtaccagatcgacagcgttgtccgtgcctgcagtgacttcctggtgcagcagctggaccccagcaatgccatcggcatcgccaacttcgctgagcagattggctgtgtggagttgcaccagcgtgcccgggagtacatctacatgcattttggggaggtggccaagcaagaggagttcttcaacctgtcccactgccaactggtgaccctcatcagccgggacgacctgaacgtgcgctgcgagtccgaggtcttccacgcctgcatcaactgggtcaagtacgactgcgaacagcgacggttctacgtccaggcgctgctgcgggccgtgcgctgccactcgttgacgccgaacttcctgcagatgcagctgcagaagtgcgagatcctgcagtccgactcccgctgcaaggactacctggtcaagatcttcgaggagctcaccctgcacaagcccacgcaggtgatgccctgccgggcgcccggcagcggcagccaacctgtgctgacacagagccccagcgtgtccgccgctcctcggcagcgggtgaccatcagcgtgtccggctctaatagcaacatcggctccaacaccgtgaactggatccagcagctgcctggaagagcccccgagctgctgatgtacgacgacgacctgctcgccccaggcgtgtctgatagattcagcggctctagaagcggcaccagcgccagcctgaccatcagcggactgcagtctgaagatgaggccgactactacgccgctacatgggacgatagcctgaacggctgggtgttcggcggcggaacaaaggtgaccgtcctgagcggctaa

SEQ ID NO: 1573 - DNA, 1365 bp, synthetic construct
  source 1..1365: mol_type = other DNA; note = NLS-Keap1-(GS)2-VL12.3 nucleic acid
ccggcggcgaaacgcgtgaaactggatggcagcggcagcggcagccagccagatcccaggcctagcggggctggggcctgctgccgattcctgcccctgcagtcacagtgccctgagggggcaggggacgcggtgatgtacgcctccactgagtgcaaggcggaggtgacgccctcccagcatggcaaccgcaccttcagctacaccctggaggatcataccaagcaggcctttggcatcatgaacgagctgcggctcagccagcagctgtgtgacgtcacactgcaggtcaagtaccaggatgcaccggccgcccagttcatggcccacaaggtggtgctggcctcatccagccctgtcttcaaggccatgttcaccaacgggctgcgggagcagggcatggaggtggtgtccattgagggtatccaccccaaggtcatggagcgcctcattgaattcgcctacacggcctccatctccatgggcgagaagtgtgtcctccacgtcatgaacggtgctgtcatgtaccagatcgacagcgttgtccgtgcctgcagtgacttcctggtgcagcagctggaccccagcaatgccatcggcatcgccaacttcgctgagcagattggctgtgtggagttgcaccagcgtgcccgggagtacatctacatgcattttggggaggtggccaagcaagaggagttcttcaacctgtcccactgccaactggtgaccctcatcagccgggacgacctgaacgtgcgctgcgagtccgaggtcttccacgcctgcatcaactgggtcaagtacgactgcgaacagcgacggttctacgtccaggcgctgctgcgggccgtgcgctgccactcgttgacgccgaacttcctgcagatgcagctgcagaagtgcgagatcctgcagtccgactcccgctgcaaggactacctggtcaagatcttcgaggagctcaccctgcacaagcccacgcaggtgatgccctgccgggcgcccggcagcggcagcggcagccaacctgtgctgacacagagccccagcgtgtccgccgctcctcggcagcgggtgaccatcagcgtgtccggctctaatagcaacatcggctccaacaccgtgaactggatccagcagctgcctggaagagcccccgagctgctgatgtacgacgacgacctgctcgccccaggcgtgtctgatagattcagcggctctagaagcggcaccagcgccagcctgaccatcagcggactgcagtctgaagatgaggccgactactacgccgctacatgggacgatagcctgaacggctgggtgttcggcggcggaacaaaggtgaccgtcctgagcggctaa

SEQ ID NO: 1574 - DNA, 1371 bp, synthetic construct
  source 1..1371: mol_type = other DNA; note = NLS-Keap1-(GS)3-VL12.3 nucleic acid
ccggcggcgaaacgcgtgaaactggatggcagcggcagcggcagccagccagatcccaggcctagcggggctggggcctgctgccgattcctgcccctgcagtcacagtgccctgagggggcaggggacgcggtgatgtacgcctccactgagtgcaaggcggaggtgacgccctcccagcatggcaaccgcaccttcagctacaccctggaggatcataccaagcaggcctttggcatcatgaacgagctgcggctcagccagcagctgtgtgacgtcacactgcaggtcaagtaccaggatgcaccggccgcccagttcatggcccacaaggtggtgctggcctcatccagccctgtcttcaaggccatgttcaccaacgggctgcgggagcagggcatggaggtggtgtccattgagggtatccaccccaaggtcatggagcgcctcattgaattcgcctacacggcctccatctccatgggcgagaagtgtgtcctccacgtcatgaacggtgctgtcatgtaccagatcgacagcgttgtccgtgcctgcagtgacttcctggtgcagcagctggaccccagcaatgccatcggcatcgccaacttcgctgagcagattggctgtgtggagttgcaccagcgtgcccgggagtacatctacatgcattttggggaggtggccaagcaagaggagttcttcaacctgtcccactgccaactggtgaccctcatcagccgggacgacctgaacgtgcgctgcgagtccgaggtcttccacgcctgcatcaactgggtcaagtacgactgcgaacagcgacggttctacgtccaggcgctgctgcgggccgtgcgctgccactcgttgacgccgaacttcctgcagatgcagctgcagaagtgcgagatcctgcagtccgactcccgctgcaaggactacctggtcaagatcttcgaggagctcaccctgcacaagcccacgcaggtgatgccctgccgggcgcccggcagcggcagcggcagcggcagccaacctgtgctgacacagagccccagcgtgtccgccgctcctcggcagcgggtgaccatcagcgtgtccggctctaatagcaacatcggctccaacaccgtgaactggatccagcagctgcctggaagagcccccgagctgctgatgtacgacgacgacctgctcgccccaggcgtgtctgatagattcagcggctctagaagcggcaccagcgccagcctgaccatcagcggactgcagtctgaagatgaggccgactactacgccgctacatgggacgatagcctgaacggctgggtgttcggcggcggaacaaaggtgaccgtcctgagcggctaa

SEQ ID NO: 1575 - DNA, 1377 bp, synthetic construct
  source 1..1377: mol_type = other DNA; note = NLS-Keap1-(GS)4-VL12.3 nucleic acid
ccggcggcgaaacgcgtgaaactggatggcagcggcagcggcagccagccagatcccaggcctagcggggctggggcctgctgccgattcctgcccctgcagtcacagtgccctgagggggcaggggacgcggtgatgtacgcctccactgagtgcaaggcggaggtgacgccctcccagcatggcaaccgcaccttcagctacaccctggaggatcataccaagcaggcctttggcatcatgaacgagctgcggctcagccagcagctgtgtgacgtcacactgcaggtcaagtaccaggatgcaccggccgcccagttcatggcccacaaggtggtgctggcctcatccagccctgtcttcaaggccatgttcaccaacgggctgcgggagcagggcatggaggtggtgtccattgagggtatccaccccaaggtcatggagcgcctcattgaattcgcctacacggcctccatctccatgggcgagaagtgtgtcctccacgtcatgaacggtgctgtcatgtaccagatcgacagcgttgtccgtgcctgcagtgacttcctggtgcagcagctggaccccagcaatgccatcggcatcgccaacttcgctgagcagattggctgtgtggagttgcaccagcgtgcccgggagtacatctacatgcattttggggaggtggccaagcaagaggagttcttcaacctgtcccactgccaactggtgaccctcatcagccgggacgacctgaacgtgcgctgcgagtccgaggtcttccacgcctgcatcaactgggtcaagtacgactgcgaacagcgacggttctacgtccaggcgctgctgcgggccgtgcgctgccactcgttgacgccgaacttcctgcagatgcagctgcagaagtgcgagatcctgcagtccgactcccgctgcaaggactacctggtcaagatcttcgaggagctcaccctgcacaagcccacgcaggtgatgccctgccgggcgcccggcagcggcagcggcagcggcagcggcagccaacctgtgctgacacagagccccagcgtgtccgccgctcctcggcagcgggtgaccatcagcgtgtccggctctaatagcaacatcggctccaacaccgtgaactggatccagcagctgcctggaagagcccccgagctgctgatgtacgacgacgacctgctcgccccaggcgtgtctgatagattcagcggctctagaagcggcaccagcgccagcctgaccatcagcggactgcagtctgaagatgaggccgactactacgccgctacatgggacgatagcctgaacggctgggtgttcggcggcggaacaaaggtgaccgtcctgagcggctaa

SEQ ID NO: 1576 - DNA, 1383 bp, synthetic construct
  source 1..1383: mol_type = other DNA; note = NLS-Keap1-(GS)5-VL12.3 nucleic acid
ccggcggcgaaacgcgtgaaactggatggcagcggcagcggcagccagccagatcccaggcctagcggggctggggcctgctgccgattcctgcccctgcagtcacagtgccctgagggggcaggggacgcggtgatgtacgcctccactgagtgcaaggcggaggtgacgccctcccagcatggcaaccgcaccttcagctacaccctggaggatcataccaagcaggcctttggcatcatgaacgagctgcggctcagccagcagctgtgtgacgtcacactgcaggtcaagtaccaggatgcaccggccgcccagttcatggcccacaaggtggtgctggcctcatccagccctgtcttcaaggccatgttcaccaacgggctgcgggagcagggcatggaggtggtgtccattgagggtatccaccccaaggtcatggagcgcctcattgaattcgcctacacggcctccatctccatgggcgagaagtgtgtcctccacgtcatgaacggtgctgtcatgtaccagatcgacagcgttgtccgtgcctgcagtgacttcctggtgcagcagctggaccccagcaatgccatcggcatcgccaacttcgctgagcagattggctgtgtggagttgcaccagcgtgcccgggagtacatctacatgcattttggggaggtggccaagcaagaggagttcttcaacctgtcccactgccaactggtgaccctcatcagccgggacgacctgaacgtgcgctgcgagtccgaggtcttccacgcctgcatcaactgggtcaagtacgactgcgaacagcgacggttctacgtccaggcgctgctgcgggccgtgcgctgccactcgttgacgccgaacttcctgcagatgcagctgcagaagtgcgagatcctgcagtccgactcccgctgcaaggactacctggtcaagatcttcgaggagctcaccctgcacaagcccacgcaggtgatgccctgccgggcgcccggcagcggcagcggcagcggcagcggcagcggcagccaacctgtgctgacacagagccccagcgtgtccgccgctcctcggcagcgggtgaccatcagcgtgtccggctctaatagcaacatcggctccaacaccgtgaactggatccagcagctgcctggaagagcccccgagctgctgatgtacgacgacgacctgctcgccccaggcgtgtctgatagattcagcggctctagaagcggcaccagcgccagcctgaccatcagcggactgcagtctgaagatgaggccgactactacgccgctacatgggacgatagcctgaacggctgggtgttcggcggcggaacaaaggtgaccgtcctgagcggctaa

SEQ ID NO: 1577 - DNA, 1389 bp, synthetic construct
  source 1..1389: mol_type = other DNA; note = NLS-Keap1-(GS)6-VL12.3 nucleic acid
ccggcggcgaaacgcgtgaaactggatggcagcggcagcggcagccagccagatcccaggcctagcggggctggggcctgctgccgattcctgcccctgcagtcacagtgccctgagggggcaggggacgcggtgatgtacgcctccactgagtgcaaggcggaggtgacgccctcccagcatggcaaccgcaccttcagctacaccctggaggatcataccaagcaggcctttggcatcatgaacgagctgcggctcagccagcagctgtgtgacgtcacactgcaggtcaagtaccaggatgcaccggccgcccagttcatggcccacaaggtggtgctggcctcatccagccctgtcttcaaggccatgttcaccaacgggctgcgggagcagggcatggaggtggtgtccattgagggtatccaccccaaggtcatggagcgcctcattgaattcgcctacacggcctccatctccatgggcgagaagtgtgtcctccacgtcatgaacggtgctgtcatgtaccagatcgacagcgttgtccgtgcctgcagtgacttcctggtgcagcagctggaccccagcaatgccatcggcatcgccaacttcgctgagcagattggctgtgtggagttgcaccagcgtgcccgggagtacatctacatgcattttggggaggtggccaagcaagaggagttcttcaacctgtcccactgccaactggtgaccctcatcagccgggacgacctgaacgtgcgctgcgagtccgaggtcttccacgcctgcatcaactgggtcaagtacgactgcgaacagcgacggttctacgtccaggcgctgctgcgggccgtgcgctgccactcgttgacgccgaacttcctgcagatgcagctgcagaagtgcgagatcctgcagtccgactcccgctgcaaggactacctggtcaagatcttcgaggagctcaccctgcacaagcccacgcaggtgatgccctgccgggcgcccggcagcggcagcggcagcggcagcggcagcggcagcggcagccaacctgtgctgacacagagccccagcgtgtccgccgctcctcggcagcgggtgaccatcagcgtgtccggctctaatagcaacatcggctccaacaccgtgaactggatccagcagctgcctggaagagcccccgagctgctgatgtacgacgacgacctgctcgccccaggcgtgtctgatagattcagcggctctagaagcggcaccagcgccagcctgaccatcagcggactgcagtctgaagatgaggccgactactacgccgctacatgggacgatagcctgaacggctgggtgttcggcggcggaacaaaggtgaccgtcctgagcggctaa

SEQ ID NO: 1578 - DNA, 1389 bp, synthetic construct
  source 1..1389: mol_type = other DNA; note = HA-NLS-Keap1-(GS)1-VL12.3 nucleic acid
atgtacccatacgatgttccagattacgctccggcggcgaaacgcgtgaaactggatggcagcggcagcggcagccagccagatcccaggcctagcggggctggggcctgctgccgattcctgcccctgcagtcacagtgccctgagggggcaggggacgcggtgatgtacgcctccactgagtgcaaggcggaggtgacgccctcccagcatggcaaccgcaccttcagctacaccctggaggatcataccaagcaggcctttggcatcatgaacgagctgcggctcagccagcagctgtgtgacgtcacactgcaggtcaagtaccaggatgcaccggccgcccagttcatggcccacaaggtggtgctggcctcatccagccctgtcttcaaggccatgttcaccaacgggctgcgggagcagggcatggaggtggtgtccattgagggtatccaccccaaggtcatggagcgcctcattgaattcgcctacacggcctccatctccatgggcgagaagtgtgtcctccacgtcatgaacggtgctgtcatgtaccagatcgacagcgttgtccgtgcctgcagtgacttcctggtgcagcagctggaccccagcaatgccatcggcatcgccaacttcgctgagcagattggctgtgtggagttgcaccagcgtgcccgggagtacatctacatgcattttggggaggtggccaagcaagaggagttcttcaacctgtcccactgccaactggtgaccctcatcagccgggacgacctgaacgtgcgctgcgagtccgaggtcttccacgcctgcatcaactgggtcaagtacgactgcgaacagcgacggttctacgtccaggcgctgctgcgggccgtgcgctgccactcgttgacgccgaacttcctgcagatgcagctgcagaagtgcgagatcctgcagtccgactcccgctgcaaggactacctggtcaagatcttcgaggagctcaccctgcacaagcccacgcaggtgatgccctgccgggcgcccggcagcggcagccaacctgtgctgacacagagccccagcgtgtccgccgctcctcggcagcgggtgaccatcagcgtgtccggctctaatagcaacatcggctccaacaccgtgaactggatccagcagctgcctggaagagcccccgagctgctgatgtacgacgacgacctgctcgccccaggcgtgtctgatagattcagcggctctagaagcggcaccagcgccagcctgaccatcagcggactgcagtctgaagatgaggccgactactacgccgctacatgggacgatagcctgaacggctgggtgttcggcggcggaacaaaggtgaccgtcctgagcggctaa

SEQ ID NO: 1579 - DNA, 1395 bp, synthetic construct
  source 1..1395: mol_type = other DNA; note = HA-NLS-Keap1-(GS)2-VL12.3 nucleic acid
atgtacccatacgatgttccagattacgctccggcggcgaaacgcgtgaaactggatggcagcggcagcggcagccagccagatcccaggcctagcggggctggggcctgctgccgattcctgcccctgcagtcacagtgccctgagggggcaggggacgcggtgatgtacgcctccactgagtgcaaggcggaggtgacgccctcccagcatggcaaccgcaccttcagctacaccctggaggatcataccaagcaggcctttggcatcatgaacgagctgcggctcagccagcagctgtgtgacgtcacactgcaggtcaagtaccaggatgcaccggccgcccagttcatggcccacaaggtggtgctggcctcatccagccctgtcttcaaggccatgttcaccaacgggctgcgggagcagggcatggaggtggtgtccattgagggtatccaccccaaggtcatggagcgcctcattgaattcgcctacacggcctccatctccatgggcgagaagtgtgtcctccacgtcatgaacggtgctgtcatgtaccagatcgacagcgttgtccgtgcctgcagtgacttcctggtgcagcagctggaccccagcaatgccatcggcatcgccaacttcgctgagcagattggctgtgtggagttgcaccagcgtgcccgggagtacatctacatgcattttggggaggtggccaagcaagaggagttcttcaacctgtcccactgccaactggtgaccctcatcagccgggacgacctgaacgtgcgctgcgagtccgaggtcttccacgcctgcatcaactgggtcaagtacgactgcgaacagcgacggttctacgtccaggcgctgctgcgggccgtgcgctgccactcgttgacgccgaacttcctgcagatgcagctgcagaagtgcgagatcctgcagtccgactcccgctgcaaggactacctggtcaagatcttcgaggagctcaccctgcacaagcccacgcaggtgatgccctgccgggcgcccggcagcggcagcggcagccaacctgtgctgacacagagccccagcgtgtccgccgctcctcggcagcgggtgaccatcagcgtgtccggctctaatagcaacatcggctccaacaccgtgaactggatccagcagctgcctggaagagcccccgagctgctgatgtacgacgacgacctgctcgccccaggcgtgtctgatagattcagcggctctagaagcggcaccagcgccagcctgaccatcagcggactgcagtctgaagatgaggccgactactacgccgctacatgggacgatagcctgaacggctgggtgttcggcggcggaacaaaggtgaccgtcctgagcggctaa

SEQ ID NO: 1580 - DNA, 1401 bp, synthetic construct
  source 1..1401: mol_type = other DNA; note = HA-NLS-Keap1-(GS)3-VL12.3 nucleic acid
atgtacccatacgatgttccagattacgctccggcggcgaaacgcgtgaaactggatggcagcggcagcggcagccagccagatcccaggcctagcggggctggggcctgctgccgattcctgcccctgcagtcacagtgccctgagggggcaggggacgcggtgatgtacgcctccactgagtgcaaggcggaggtgacgccctcccagcatggcaaccgcaccttcagctacaccctggaggatcataccaagcaggcctttggcatcatgaacgagctgcggctcagccagcagctgtgtgacgtcacactgcaggtcaagtaccaggatgcaccggccgcccagttcatggcccacaaggtggtgctggcctcatccagccctgtcttcaaggccatgttcaccaacgggctgcgggagcagggcatggaggtggtgtccattgagggtatccaccccaaggtcatggagcgcctcattgaattcgcctacacggcctccatctccatgggcgagaagtgtgtcctccacgtcatgaacggtgctgtcatgtaccagatcgacagcgttgtccgtgcctgcagtgacttcctggtgcagcagctggaccccagcaatgccatcggcatcgccaacttcgctgagcagattggctgtgtggagttgcaccagcgtgcccgggagtacatctacatgcattttggggaggtggccaagcaagaggagttcttcaacctgtcccactgccaactggtgaccctcatcagccgggacgacctgaacgtgcgctgcgagtccgaggtcttccacgcctgcatcaactgggtcaagtacgactgcgaacagcgacggttctacgtccaggcgctgctgcgggccgtgcgctgccactcgttgacgccgaacttcctgcagatgcagctgcagaagtgcgagatcctgcagtccgactcccgctgcaaggactacctggtcaagatcttcgaggagctcaccctgcacaagcccacgcaggtgatgccctgccgggcgcccggcagcggcagcggcagcggcagccaacctgtgctgacacagagccccagcgtgtccgccgctcctcggcagcgggtgaccatcagcgtgtccggctctaatagcaacatcggctccaacaccgtgaactggatccagcagctgcctggaagagcccccgagctgctgatgtacgacgacgacctgctcgccccaggcgtgtctgatagattcagcggctctagaagcggcaccagcgccagcctgaccatcagcggactgcagtctgaagatgaggccgactactacgccgctacatgggacgatagcctgaacggctgggtgttcggcggcggaacaaaggtgaccgtcctgagcggctaa

SEQ ID NO: 1581 - DNA, 1407 bp, synthetic construct
  source 1..1407: mol_type = other DNA; note = HA-NLS-Keap1-(GS)4-VL12.3 nucleic acid
atgtacccatacgatgttccagattacgctccggcggcgaaacgcgtgaaactggatggcagcggcagcggcagccagccagatcccaggcctagcggggctggggcctgctgccgattcctgcccctgcagtcacagtgccctgagggggcaggggacgcggtgatgtacgcctccactgagtgcaaggcggaggtgacgccctcccagcatggcaaccgcaccttcagctacaccctggaggatcataccaagcaggcctttggcatcatgaacgagctgcggctcagccagcagctgtgtgacgtcacactgcaggtcaagtaccaggatgcaccggccgcccagttcatggcccacaaggtggtgctggcctcatccagccctgtcttcaaggccatgttcaccaacgggctgcgggagcagggcatggaggtggtgtccattgagggtatccaccccaaggtcatggagcgcctcattgaattcgcctacacggcctccatctccatgggcgagaagtgtgtcctccacgtcatgaacggtgctgtcatgtaccagatcgacagcgttgtccgtgcctgcagtgacttcctggtgcagcagctggaccccagcaatgccatcggcatcgccaacttcgctgagcagattggctgtgtggagttgcaccagcgtgcccgggagtacatctacatgcattttggggaggtggccaagcaagaggagttcttcaacctgtcccactgccaactggtgaccctcatcagccgggacgacctgaacgtgcgctgcgagtccgaggtcttccacgcctgcatcaactgggtcaagtacgactgcgaacagcgacggttctacgtccaggcgctgctgcgggccgtgcgctgccactcgttgacgccgaacttcctgcagatgcagctgcagaagtgcgagatcctgcagtccgactcccgctgcaaggactacctggtcaagatcttcgaggagctcaccctgcacaagcccacgcaggtgatgccctgccgggcgcccggcagcggcagcggcagcggcagcggcagccaacctgtgctgacacagagccccagcgtgtccgccgctcctcggcagcgggtgaccatcagcgtgtccggctctaatagcaacatcggctccaacaccgtgaactggatccagcagctgcctggaagagcccccgagctgctgatgtacgacgacgacctgctcgccccaggcgtgtctgatagattcagcggctctagaagcggcaccagcgccagcctgaccatcagcggactgcagtctgaagatgaggccgactactacgccgctacatgggacgatagcctgaacggctgggtgttcggcggcggaacaaaggtgaccgtcctgagcggctaa

SEQ ID NO: 1582 - DNA, 1413 bp, synthetic construct
  source 1..1413: mol_type = other DNA; note = HA-NLS-Keap1-(GS)5-VL12.3 nucleic acid
atgtacccatacgatgttccagattacgctccggcggcgaaacgcgtgaaactggatggcagcggcagcggcagccagccagatcccaggcctagcggggctggggcctgctgccgattcctgcccctgcagtcacagtgccctgagggggcaggggacgcggtgatgtacgcctccactgagtgcaaggcggaggtgacgccctcccagcatggcaaccgcaccttcagctacaccctggaggatcataccaagcaggcctttggcatcatgaacgagctgcggctcagccagcagctgtgtgacgtcacactgcaggtcaagtaccaggatgcaccggccgcccagttcatggcccacaaggtggtgctggcctcatccagccctgtcttcaaggccatgttcaccaacgggctgcgggagcagggcatggaggtggtgtccattgagggtatccaccccaaggtcatggagcgcctcattgaattcgcctacacggcctccatctccatgggcgagaagtgtgtcctccacgtcatgaacggtgctgtcatgtaccagatcgacagcgttgtccgtgcctgcagtgacttcctggtgcagcagctggaccccagcaatgccatcggcatcgccaacttcgctgagcagattggctgtgtggagttgcaccagcgtgcccgggagtacatctacatgcattttggggaggtggccaagcaagaggagttcttcaacctgtcccactgccaactggtgaccctcatcagccgggacgacctgaacgtgcgctgcgagtccgaggtcttccacgcctgcatcaactgggtcaagtacgactgcgaacagcgacggttctacgtccaggcgctgctgcgggccgtgcgctgccactcgttgacgccgaacttcctgcagatgcagctgcagaagtgcgagatcctgcagtccgactcccgctgcaaggactacctggtcaagatcttcgaggagctcaccctgcacaagcccacgcaggtgatgccctgccgggcgcccggcagcggcagcggcagcggcagcggcagcggcagccaacctgtgctgacacagagccccagcgtgtccgccgctcctcggcagcgggtgaccatcagcgtgtccggctctaatagcaacatcggctccaacaccgtgaactggatccagcagctgcctggaagagcccccgagctgctgatgtacgacgacgacctgctcgccccaggcgtgtctgatagattcagcggctctagaagcggcaccagcgccagcctgaccatcagcggactgcagtctgaagatgaggccgactactacgccgctacatgggacgatagcctgaacggctgggtgttcggcggcggaacaaaggtgaccgtcctgagcggctaa

SEQ ID NO: 1583 - DNA, 1419 bp, synthetic construct
  source 1..1419: mol_type = other DNA; note = HA-NLS-Keap1-(GS)6-VL12.3 nucleic acid
atgtacccatacgatgttccagattacgctccggcggcgaaacgcgtgaaactggatggcagcggcagcggcagccagccagatcccaggcctagcggggctggggcctgctgccgattcctgcccctgcagtcacagtgccctgagggggcaggggacgcggtgatgtacgcctccactgagtgcaaggcggaggtgacgccctcccagcatggcaaccgcaccttcagctacaccctggaggatcataccaagcaggcctttggcatcatgaacgagctgcggctcagccagcagctgtgtgacgtcacactgcaggtcaagtaccaggatgcaccggccgcccagttcatggcccacaaggtggtgctggcctcatccagccctgtcttcaaggccatgttcaccaacgggctgcgggagcagggcatggaggtggtgtccattgagggtatccaccccaaggtcatggagcgcctcattgaattcgcctacacggcctccatctccatgggcgagaagtgtgtcctccacgtcatgaacggtgctgtcatgtaccagatcgacagcgttgtccgtgcctgcagtgacttcctggtgcagcagctggaccccagcaatgccatcggcatcgccaacttcgctgagcagattggctgtgtggagttgcaccagcgtgcccgggagtacatctacatgcattttggggaggtggccaagcaagaggagttcttcaacctgtcccactgccaactggtgaccctcatcagccgggacgacctgaacgtgcgctgcgagtccgaggtcttccacgcctgcatcaactgggtcaagtacgactgcgaacagcgacggttctacgtccaggcgctgctgcgggccgtgcgctgccactcgttgacgccgaacttcctgcagatgcagctgcagaagtgcgagatcctgcagtccgactcccgctgcaaggactacctggtcaagatcttcgaggagctcaccctgcacaagcccacgcaggtgatgccctgccgggcgcccggcagcggcagcggcagcggcagcggcagcggcagcggcagccaacctgtgctgacacagagccccagcgtgtccgccgctcctcggcagcgggtgaccatcagcgtgtccggctctaatagcaacatcggctccaacaccgtgaactggatccagcagctgcctggaagagcccccgagctgctgatgtacgacgacgacctgctcgccccaggcgtgtctgatagattcagcggctctagaagcggcaccagcgccagcctgaccatcagcggactgcagtctgaagatgaggccgactactacgccgctacatgggacgatagcctgaacggctgggtgttcggcggcggaacaaaggtgaccgtcctgagcggctaa

SEQ ID NO: 1584 - DNA, 777 bp, synthetic construct
  source 1..777: mol_type = other DNA; note = NLS-RNF125-(GS)1-VL12.3 nucleic acid
ccggcggcgaaacgcgtgaaactggatggcagcggcagcggcagcggctccgtgctgagcaccgacagcggcaaatcggcgcccgcctctgccaccgcgcgggccctggagcgcaggagggacccggagttgcccgtcacgtccttcgactgcgccgtgtgccttgaggtgttacaccagcctgtccggacccgctgcggccacgtattctgccgttcctgtattgctaccagtctgaagaacaacaagtggacctgtccttattgccgggcatatcttccttcagaaggagttccagcaactgatgtagccaaaagaatgaaatcagagtataagaactgcgctgagtgtgacaccctggtttgcctcagtgaaatgagggcacatattcggacttgtcagaagtacatagataagtatggaccaggcagcggcagccaacctgtgctgacacagagccccagcgtgtccgccgctcctcggcagcgggtgaccatcagcgtgtccggctctaatagcaacatcggctccaacaccgtgaactggatccagcagctgcctggaagagcccccgagctgctgatgtacgacgacgacctgctcgccccaggcgtgtctgatagattcagcggctctagaagcggcaccagcgccagcctgaccatcagcggactgcagtctgaagatgaggccgactactacgccgctacatgggacgatagcctgaacggctgggtgttcggcggcggaacaaaggtgaccgtcctgagcggctaa

SEQ ID NO: 1585 - DNA, 783 bp, synthetic construct
  source 1..783: mol_type = other DNA; note = NLS-RNF125-(GS)2-VL12.3 nucleic acid
ccggcggcgaaacgcgtgaaactggatggcagcggcagcggcagcggctccgtgctgagcaccgacagcggcaaatcggcgcccgcctctgccaccgcgcgggccctggagcgcaggagggacccggagttgcccgtcacgtccttcgactgcgccgtgtgccttgaggtgttacaccagcctgtccggacccgctgcggccacgtattctgccgttcctgtattgctaccagtctgaagaacaacaagtggacctgtccttattgccgggcatatcttccttcagaaggagttccagcaactgatgtagccaaaagaatgaaatcagagtataagaactgcgctgagtgtgacaccctggtttgcctcagtgaaatgagggcacatattcggacttgtcagaagtacatagataagtatggaccaggcagcggcagcggcagccaacctgtgctgacacagagccccagcgtgtccgccgctcctcggcagcgggtgaccatcagcgtgtccggctctaatagcaacatcggctccaacaccgtgaactggatccagcagctgcctggaagagcccccgagctgctgatgtacgacgacgacctgctcgccccaggcgtgtctgatagattcagcggctctagaagcggcaccagcgccagcctgaccatcagcggactgcagtctgaagatgaggccgactactacgccgctacatgggacgatagcctgaacggctgggtgttcggcggcggaacaaaggtgaccgtcctgagcggctaa

SEQ ID NO: 1586 - DNA, 789 bp, synthetic construct
  source 1..789: mol_type = other DNA; note = NLS-RNF125-(GS)3-VL12.3 nucleic acid
ccggcggcgaaacgcgtgaaactggatggcagcggcagcggcagcggctccgtgctgagcaccgacagcggcaaatcggcgcccgcctctgccaccgcgcgggccctggagcgcaggagggacccggagttgcccgtcacgtccttcgactgcgccgtgtgccttgaggtgttacaccagcctgtccggacccgctgcggccacgtattctgccgttcctgtattgctaccagtctgaagaacaacaagtggacctgtccttattgccgggcatatcttccttcagaaggagttccagcaactgatgtagccaaaagaatgaaatcagagtataagaactgcgctgagtgtgacaccctggtttgcctcagtgaaatgagggcacatattcggacttgtcagaagtacatagataagtatggaccaggcagcggcagcggcagcggcagccaacctgtgctgacacagagccccagcgtgtccgccgctcctcggcagcgggtgaccatcagcgtgtccggctctaatagcaacatcggctccaacaccgtgaactggatccagcagctgcctggaagagcccccgagctgctgatgtacgacgacgacctgctcgccccaggcgtgtctgatagattcagcggctctagaagcggcaccagcgccagcctgaccatcagcggactgcagtctgaagatgaggccgactactacgccgctacatgggacgatagcctgaacggctgggtgttcggcggcggaacaaaggtgaccgtcctgagcggctaa

SEQ ID NO: 1587 - DNA, 795 bp, synthetic construct
  source 1..795: mol_type = other DNA; note = NLS-RNF125-(GS)4-VL12.3 nucleic acid
ccggcggcgaaacgcgtgaaactggatggcagcggcagcggcagcggctccgtgctgagcaccgacagcggcaaatcggcgcccgcctctgccaccgcgcgggccctggagcgcaggagggacccggagttgcccgtcacgtccttcgactgcgccgtgtgccttgaggtgttacaccagcctgtccggacccgctgcggccacgtattctgccgttcctgtattgctaccagtctgaagaacaacaagtggacctgtccttattgccgggcatatcttccttcagaaggagttccagcaactgatgtagccaaaagaatgaaatcagagtataagaactgcgctgagtgtgacaccctggtttgcctcagtgaaatgagggcacatattcggacttgtcagaagtacatagataagtatggaccaggcagcggcagcggcagcggcagcggcagccaacctgtgctgacacagagccccagcgtgtccgccgctcctcggcagcgggtgaccatcagcgtgtccggctctaatagcaacatcggctccaacaccgtgaactggatccagcagctgcctggaagagcccccgagctgctgatgtacgacgacgacctgctcgccccaggcgtgtctgatagattcagcggctctagaagcggcaccagcgccagcctgaccatcagcggactgcagtctgaagatgaggccgactactacgccgctacatgggacgatagcctgaacggctgggtgttcggcggcggaacaaaggtgaccgtcctgagcggctaa

SEQ ID NO: 1588 - DNA, 801 bp, synthetic construct
  source 1..801: mol_type = other DNA; note = NLS-RNF125-(GS)5-VL12.3 nucleic acid
ccggcggcgaaacgcgtgaaactggatggcagcggcagcggcagcggctccgtgctgagcaccgacagcggcaaatcggcgcccgcctctgccaccgcgcgggccctggagcgcaggagggacccggagttgcccgtcacgtccttcgactgcgccgtgtgccttgaggtgttacaccagcctgtccggacccgctgcggccacgtattctgccgttcctgtattgctaccagtctgaagaacaacaagtggacctgtccttattgccgggcatatcttccttcagaaggagttccagcaactgatgtagccaaaagaatgaaatcagagtataagaactgcgctgagtgtgacaccctggtttgcctcagtgaaatgagggcacatattcggacttgtcagaagtacatagataagtatggaccaggcagcggcagcggcagcggcagcggcagcggcagccaacctgtgctgacacagagccccagcgtgtccgccgctcctcggcagcgggtgaccatcagcgtgtccggctctaatagcaacatcggctccaacaccgtgaactggatccagcagctgcctggaagagcccccgagctgctgatgtacgacgacgacctgctcgccccaggcgtgtctgatagattcagcggctctagaagcggcaccagcgccagcctgaccatcagcggactgcagtctgaagatgaggccgactactacgccgctacatgggacgatagcctgaacggctgggtgttcggcggcggaacaaaggtgaccgtcctgagcggctaa

SEQ ID NO: 1589 - DNA, 807 bp, synthetic construct
  source 1..807: mol_type = other DNA; note = NLS-RNF125-(GS)6-VL12.3 nucleic acid
ccggcggcgaaacgcgtgaaactggatggcagcggcagcggcagcggctccgtgctgagcaccgacagcggcaaatcggcgcccgcctctgccaccgcgcgggccctggagcgcaggagggacccggagttgcccgtcacgtccttcgactgcgccgtgtgccttgaggtgttacaccagcctgtccggacccgctgcggccacgtattctgccgttcctgtattgctaccagtctgaagaacaacaagtggacctgtccttattgccgggcatatcttccttcagaaggagttccagcaactgatgtagccaaaagaatgaaatcagagtataagaactgcgctgagtgtgacaccctggtttgcctcagtgaaatgagggcacatattcggacttgtcagaagtacatagataagtatggaccaggcagcggcagcggcagcggcagcggcagcggcagcggcagccaacctgtgctgacacagagccccagcgtgtccgccgctcctcggcagcgggtgaccatcagcgtgtccggctctaatagcaacatcggctccaacaccgtgaactggatccagcagctgcctggaagagcccccgagctgctgatgtacgacgacgacctgctcgccccaggcgtgtctgatagattcagcggctctagaagcggcaccagcgccagcctgaccatcagcggactgcagtctgaagatgaggccgactactacgccgctacatgggacgatagcctgaacggctgggtgttcggcggcggaacaaaggtgaccgtcctgagcggctaa

SEQ ID NO: 1590 - DNA, 807 bp, synthetic construct
  source 1..807: mol_type = other DNA; note = HA-NLS-RNF125-(GS)1-VL12.3 nucleic acid
atgtacccatacgatgttccagattacgctccggcggcgaaacgcgtgaaactggatggcagcggcagcggcagcggctccgtgctgagcaccgacagcggcaaatcggcgcccgcctctgccaccgcgcgggccctggagcgcaggagggacccggagttgcccgtcacgtccttcgactgcgccgtgtgccttgaggtgttacaccagcctgtccggacccgctgcggccacgtattctgccgttcctgtattgctaccagtctgaagaacaacaagtggacctgtccttattgccgggcatatcttccttcagaaggagttccagcaactgatgtagccaaaagaatgaaatcagagtataagaactgcgctgagtgtgacaccctggtttgcctcagtgaaatgagggcacatattcggacttgtcagaagtacatagataagtatggaccaggcagcggcagccaacctgtgctgacacagagccccagcgtgtccgccgctcctcggcagcgggtgaccatcagcgtgtccggctctaatagcaacatcggctccaacaccgtgaactggatccagcagctgcctggaagagcccccgagctgctgatgtacgacgacgacctgctcgccccaggcgtgtctgatagattcagcggctctagaagcggcaccagcgccagcctgaccatcagcggactgcagtctgaagatgaggccgactactacgccgctacatgggacgatagcctgaacggctgggtgttcggcggcggaacaaaggtgaccgtcctgagcggctaa

SEQ ID NO: 1591 - DNA, 813 bp, synthetic construct
  source 1..813: mol_type = other DNA; note = HA-NLS-RNF125-(GS)2-VL12.3 nucleic acid
atgtacccatacgatgttccagattacgctccggcggcgaaacgcgtgaaactggatggcagcggcagcggcagcggctccgtgctgagcaccgacagcggcaaatcggcgcccgcctctgccaccgcgcgggccctggagcgcaggagggacccggagttgcccgtcacgtccttcgactgcgccgtgtgccttgaggtgttacaccagcctgtccggacccgctgcggccacgtattctgccgttcctgtattgctaccagtctgaagaacaacaagtggacctgtccttattgccgggcatatcttccttcagaaggagttccagcaactgatgtagccaaaagaatgaaatcagagtataagaactgcgctgagtgtgacaccctggtttgcctcagtgaaatgagggcacatattcggacttgtcagaagtacatagataagtatggaccaggcagcggcagcggcagccaacctgtgctgacacagagccccagcgtgtccgccgctcctcggcagcgggtgaccatcagcgtgtccggctctaatagcaacatcggctccaacaccgtgaactggatccagcagctgcctggaagagcccccgagctgctgatgtacgacgacgacctgctcgccccaggcgtgtctgatagattcagcggctctagaagcggcaccagcgccagcctgaccatcagcggactgcagtctgaagatgaggccgactactacgccgctacatgggacgatagcctgaacggctgggtgttcggcggcggaacaaaggtgaccgtcctgagcggctaa

SEQ ID NO: 1592 - DNA, 819 bp, synthetic construct
  source 1..819: mol_type = other DNA; note = HA-NLS-RNF125-(GS)3-VL12.3 nucleic acid
atgtacccatacgatgttccagattacgctccggcggcgaaacgcgtgaaactggatggcagcggcagcggcagcggctccgtgctgagcaccgacagcggcaaatcggcgcccgcctctgccaccgcgcgggccctggagcgcaggagggacccggagttgcccgtcacgtccttcgactgcgccgtgtgccttgaggtgttacaccagcctgtccggacccgctgcggccacgtattctgccgttcctgtattgctaccagtctgaagaacaacaagtggacctgtccttattgccgggcatatcttccttcagaaggagttccagcaactgatgtagccaaaagaatgaaatcagagtataagaactgcgctgagtgtgacaccctggtttgcctcagtgaaatgagggcacatattcggacttgtcagaagtacatagataagtatggaccaggcagcggcagcggcagcggcagccaacctgtgctgacacagagccccagcgtgtccgccgctcctcggcagcgggtgaccatcagcgtgtccggctctaatagcaacatcggctccaacaccgtgaactggatccagcagctgcctggaagagcccccgagctgctgatgtacgacgacgacctgctcgccccaggcgtgtctgatagattcagcggctctagaagcggcaccagcgccagcctgaccatcagcggactgcagtctgaagatgaggccgactactacgccgctacatgggacgatagcctgaacggctgggtgttcggcggcggaacaaaggtgaccgtcctgagcggctaa

SEQ ID NO: 1593 - DNA, 825 bp, synthetic construct
  source 1..825: mol_type = other DNA; note = HA-NLS-RNF125-(GS)4-VL12.3 nucleic acid
atgtacccatacgatgttccagattacgctccggcggcgaaacgcgtgaaactggatggcagcggcagcggcagcggctccgtgctgagcaccgacagcggcaaatcggcgcccgcctctgccaccgcgcgggccctggagcgcaggagggacccggagttgcccgtcacgtccttcgactgcgccgtgtgccttgaggtgttacaccagcctgtccggacccgctgcggccacgtattctgccgttcctgtattgctaccagtctgaagaacaacaagtggacctgtccttattgccgggcatatcttccttcagaaggagttccagcaactgatgtagccaaaagaatgaaatcagagtataagaactgcgctgagtgtgacaccctggtttgcctcagtgaaatgagggcacatattcggacttgtcagaagtacatagataagtatggaccaggcagcggcagcggcagcggcagcggcagccaacctgtgctgacacagagccccagcgtgtccgccgctcctcggcagcgggtgaccatcagcgtgtccggctctaatagcaacatcggctccaacaccgtgaactggatccagcagctgcctggaagagcccccgagctgctgatgtacgacgacgacctgctcgccccaggcgtgtctgatagattcagcggctctagaagcggcaccagcgccagcctgaccatcagcggactgcagtctgaagatgaggccgactactacgccgctacatgggacgatagcctgaacggctgggtgttcggcggcggaacaaaggtgaccgtcctgagcggctaa

SEQ ID NO: 1594 - DNA, 831 bp, synthetic construct
  source 1..831: mol_type = other DNA; note = HA-NLS-RNF125-(GS)5-VL12.3 nucleic acid
atgtacccatacgatgttccagattacgctccggcggcgaaacgcgtgaaactggatggcagcggcagcggcagcggctccgtgctgagcaccgacagcggcaaatcggcgcccgcctctgccaccgcgcgggccctggagcgcaggagggacccggagttgcccgtcacgtccttcgactgcgccgtgtgccttgaggtgttacaccagcctgtccggacccgctgcggccacgtattctgccgttcctgtattgctaccagtctgaagaacaacaagtggacctgtccttattgccgggcatatcttccttcagaaggagttccagcaactgatgtagccaaaagaatgaaatcagagtataagaactgcgctgagtgtgacaccctggtttgcctcagtgaaatgagggcacatattcggacttgtcagaagtacatagataagtatggaccaggcagcggcagcggcagcggcagcggcagcggcagccaacctgtgctgacacagagccccagcgtgtccgccgctcctcggcagcgggtgaccatcagcgtgtccggctctaatagcaacatcggctccaacaccgtgaactggatccagcagctgcctggaagagcccccgagctgctgatgtacgacgacgacctgctcgccccaggcgtgtctgatagattcagcggctctagaagcggcaccagcgccagcctgaccatcagcggactgcagtctgaagatgaggccgactactacgccgctacatgggacgatagcctgaacggctgggtgttcggcggcggaacaaaggtgaccgtcctgagcggctaa

SEQ ID NO: 1595 - DNA, 837 bp, synthetic construct
  source 1..837: mol_type = other DNA; note = HA-NLS-RNF125-(GS)6-VL12.3 nucleic acid
atgtacccatacgatgttccagattacgctccggcggcgaaacgcgtgaaactggatggcagcggcagcggcagcggctccgtgctgagcaccgacagcggcaaatcggcgcccgcctctgccaccgcgcgggccctggagcgcaggagggacccggagttgcccgtcacgtccttcgactgcgccgtgtgccttgaggtgttacaccagcctgtccggacccgctgcggccacgtattctgccgttcctgtattgctaccagtctgaagaacaacaagtggacctgtccttattgccgggcatatcttccttcagaaggagttccagcaactgatgtagccaaaagaatgaaatcagagtataagaactgcgctgagtgtgacaccctggtttgcctcagtgaaatgagggcacatattcggacttgtcagaagtacatagataagtatggaccaggcagcggcagcggcagcggcagcggcagcggcagcggcagccaacctgtgctgacacagagccccagcgtgtccgccgctcctcggcagcgggtgaccatcagcgtgtccggctctaatagcaacatcggctccaacaccgtgaactggatccagcagctgcctggaagagcccccgagctgctgatgtacgacgacgacctgctcgccccaggcgtgtctgatagattcagcggctctagaagcggcaccagcgccagcctgaccatcagcggactgcagtctgaagatgaggccgactactacgccgctacatgggacgatagcctgaacggctgggtgttcggcggcggaacaaaggtgaccgtcctgagcggctaa

SEQ ID NO: 1596 - DNA, 1074 bp, synthetic construct
  source 1..1074: mol_type = other DNA; note = VL12.3-(GS)1-SPOP-NLS nucleic acid
atgggcagccaacctgtgctgacacagagccccagcgtgtccgccgctcctcggcagcgggtgaccatcagcgtgtccggctctaatagcaacatcggctccaacaccgtgaactggatccagcagctgcctggaagagcccccgagctgctgatgtacgacgacgacctgctcgccccaggcgtgtctgatagattcagcggctctagaagcggcaccagcgccagcctgaccatcagcggactgcagtctgaagatgaggccgactactacgccgctacatgggacgatagcctgaacggctgggtgttcggcggcggaacaaaggtgaccgtcctgagcggcggcagcaacgggcttctccctgatgacaagcttaccctcttctgcgaggtgagtgttgtgcaagattctgtcaacatttctggccagaataccatgaacatggtaaaggttcctgagtgccggctggcagatgagttaggaggactgtgggagaattcccggttcacagactgctgcttgtgtgttgccggccaggaattccaggctcacaaggctatcttagcagctcgttctccggtttttagtgccatgtttgaacatgaaatggaggagagcaaaaagaatcgagttgaaatcaatgatgtggagcctgaagtttttaaggaaatgatgtgcttcatttacacggggaaggctccaaacctcgacaaaatggctgatgatttgctggcagctgctgacaagtatgccctggagcgcttaaaggtcatgtgtgaggatgccctctgcagtaacctgtccgtggagaacgctgcagaaattctcatcctggccgacctccacagtgcagatcagttgaaaactcaggcagtggatttcatcaactatcatgcttcggatgtcttggagacctctgggtggaagtcaatggtggtgtcacatccccacttggtggctgaggcataccgctctctggcttcagcacagtgcccttttctgggacccccacgcaaacgcctgaagcaatccggcagcggcagcccggcggcgaaacgcgtgaaactggat

SEQ ID NO: 1597 - DNA, 1080 bp, synthetic construct
  source 1..1080: mol_type = other DNA; note = VL12.3-(GS)2-SPOP-NLS nucleic acid
atgggcagccaacctgtgctgacacagagccccagcgtgtccgccgctcctcggcagcgggtgaccatcagcgtgtccggctctaatagcaacatcggctccaacaccgtgaactggatccagcagctgcctggaagagcccccgagctgctgatgtacgacgacgacctgctcgccccaggcgtgtctgatagattcagcggctctagaagcggcaccagcgccagcctgaccatcagcggactgcagtctgaagatgaggccgactactacgccgctacatgggacgatagcctgaacggctgggtgttcggcggcggaacaaaggtgaccgtcctgagcggcggcagcggcagcaacgggcttctccctgatgacaagcttaccctcttctgcgaggtgagtgttgtgcaagattctgtcaacatttctggccagaataccatgaacatggtaaaggttcctgagtgccggctggcagatgagttaggaggactgtgggagaattcccggttcacagactgctgcttgtgtgttgccggccaggaattccaggctcacaaggctatcttagcagctcgttctccggtttttagtgccatgtttgaacatgaaatggaggagagcaaaaagaatcgagttgaaatcaatgatgtggagcctgaagtttttaaggaaatgatgtgcttcatttacacggggaaggctccaaacctcgacaaaatggctgatgatttgctggcagctgctgacaagtatgccctggagcgcttaaaggtcatgtgtgaggatgccctctgcagtaacctgtccgtggagaacgctgcagaaattctcatcctggccgacctccacagtgcagatcagttgaaaactcaggcagtggatttcatcaactatcatgcttcggatgtcttggagacctctgggtggaagtcaatggtggtgtcacatccccacttggtggctgaggcataccgctctctggcttcagcacagtgcccttttctgggacccccacgcaaacgcctgaagcaatccggcagcggcagcccggcggcgaaacgcgtgaaactggat

SEQ ID NO: 1598 - DNA, 1086 bp, synthetic construct
  source 1..1086: mol_type = other DNA; note = VL12.3-(GS)3-SPOP-NLS nucleic acid
atgggcagccaacctgtgctgacacagagccccagcgtgtccgccgctcctcggcagcgggtgaccatcagcgtgtccggctctaatagcaacatcggctccaacaccgtgaactggatccagcagctgcctggaagagcccccgagctgctgatgtacgacgacgacctgctcgccccaggcgtgtctgatagattcagcggctctagaagcggcaccagcgccagcctgaccatcagcggactgcagtctgaagatgaggccgactactacgccgctacatgggacgatagcctgaacggctgggtgttcggcggcggaacaaaggtgaccgtcctgagcggcggcagcggcagcggcagcaacgggcttctccctgatgacaagcttaccctcttctgcgaggtgagtgttgtgcaagattctgtcaacatttctggccagaataccatgaacatggtaaaggttcctgagtgccggctggcagatgagttaggaggactgtgggagaattcccggttcacagactgctgcttgtgtgttgccggccaggaattccaggctcacaaggctatcttagcagctcgttctccggtttttagtgccatgtttgaacatgaaatggaggagagcaaaaagaatcgagttgaaatcaatgatgtggagcctgaagtttttaaggaaatgatgtgcttcatttacacggggaaggctccaaacctcgacaaaatggctgatgatttgctggcagctgctgacaagtatgccctggagcgcttaaaggtcatgtgtgaggatgccctctgcagtaacctgtccgtggagaacgctgcagaaattctcatcctggccgacctccacagtgcagatcagttgaaaactcaggcagtggatttcatcaactatcatgcttcggatgtcttggagacctctgggtggaagtcaatggtggtgtcacatccccacttggtggctgaggcataccgctctctggcttcagcacagtgcccttttctgggacccccacgcaaacgcctgaagcaatccggcagcggcagcccggcggcgaaacgcgtgaaactggat

SEQ ID NO: 1599 - DNA, 1092 bp, synthetic construct
  source 1..1092: mol_type = other DNA; note = VL12.3-(GS)4-SPOP-NLS nucleic acid
atgggcagccaacctgtgctgacacagagccccagcgtgtccgccgctcctcggcagcgggtgaccatcagcgtgtccggctctaatagcaacatcggctccaacaccgtgaactggatccagcagctgcctggaagagcccccgagctgctgatgtacgacgacgacctgctcgccccaggcgtgtctgatagattcagcggctctagaagcggcaccagcgccagcctgaccatcagcggactgcagtctgaagatgaggccgactactacgccgctacatgggacgatagcctgaacggctgggtgttcggcggcggaacaaaggtgaccgtcctgagcggcggcagcggcagcggcagcggcagcaacgggcttctccctgatgacaagcttaccctcttctgcgaggtgagtgttgtgcaagattctgtcaacatttctggccagaataccatgaacatggtaaaggttcctgagtgccggctggcagatgagttaggaggactgtgggagaattcccggttcacagactgctgcttgtgtgttgccggccaggaattccaggctcacaaggctatcttagcagctcgttctccggtttttagtgccatgtttgaacatgaaatggaggagagcaaaaagaatcgagttgaaatcaatgatgtggagcctgaagtttttaaggaaatgatgtgcttcatttacacggggaaggctccaaacctcgacaaaatggctgatgatttgctggcagctgctgacaagtatgccctggagcgcttaaaggtcatgtgtgaggatgccctctgcagtaacctgtccgtggagaacgctgcagaaattctcatcctggccgacctccacagtgcagatcagttgaaaactcaggcagtggatttcatcaactatcatgcttcggatgtcttggagacctctgggtggaagtcaatggtggtgtcacatccccacttggtggctgaggcataccgctctctggcttcagcacagtgcccttttctgggacccccacgcaaacgcctgaagcaatccggcagcggcagcccggcggcgaaacgcgtgaaactggat

SEQ ID NO: 1600 - DNA, 1098 bp, synthetic construct
  source 1..1098: mol_type = other DNA; note = VL12.3-(GS)5-SPOP-NLS nucleic acid
atgggcagccaacctgtgctgacacagagccccagcgtgtccgccgctcctcggcagcgggtgaccatcagcgtgtccggctctaatagcaacatcggctccaacaccgtgaactggatccagcagctgcctggaagagcccccgagctgctgatgtacgacgacgacctgctcgccccaggcgtgtctgatagattcagcggctctagaagcggcaccagcgccagcctgaccatcagcggactgcagtctgaagatgaggccgactactacgccgctacatgggacgatagcctgaacggctgggtgttcggcggcggaacaaaggtgaccgtcctgagcggcggcagcggcagcggcagcggcagcggcagcaacgggcttctccctgatgacaagcttaccctcttctgcgaggtgagtgttgtgcaagattctgtcaacatttctggccagaataccatgaacatggtaaaggttcctgagtgccggctggcagatgagttaggaggactgtgggagaattcccggttcacagactgctgcttgtgtgttgccggccaggaattccaggctcacaaggctatcttagcagctcgttctccggtttttagtgccatgtttgaacatgaaatggaggagagcaaaaagaatcgagttgaaatcaatgatgtggagcctgaagtttttaaggaaatgatgtgcttcatttacacggggaaggctccaaacctcgacaaaatggctgatgatttgctggcagctgctgacaagtatgccctggagcgcttaaaggtcatgtgtgaggatgccctctgcagtaacctgtccgtggagaacgctgcagaaattctcatcctggccgacctccacagtgcagatcagttgaaaactcaggcagtggatttcatcaactatcatgcttcggatgtcttggagacctctgggtggaagtcaatggtggtgtcacatccccacttggtggctgaggcataccgctctctggcttcagcacagtgcccttttctgggacccccacgcaaacgcctgaagcaatccggcagcggcagcccggcggcgaaacgcgtgaaactggat

SEQ ID NO: 1601 - DNA, 1104 bp, synthetic construct
  source 1..1104: mol_type = other DNA; note = VL12.3-(GS)6-SPOP-NLS nucleic acid
atgggcagccaacctgtgctgacacagagccccagcgtgtccgccgctcctcggcagcgggtgaccatcagcgtgtccggctctaatagcaacatcggctccaacaccgtgaactggatccagcagctgcctggaagagcccccgagctgctgatgtacgacgacgacctgctcgccccaggcgtgtctgatagattcagcggctctagaagcggcaccagcgccagcctgaccatcagcggactgcagtctgaagatgaggccgactactacgccgctacatgggacgatagcctgaacggctgggtgttcggcggcggaacaaaggtgaccgtcctgagcggcggcagcggcagcggcagcggcagcggcagcggcagcaacgggcttctccctgatgacaagcttaccctcttctgcgaggtgagtgttgtgcaagattctgtcaacatttctggccagaataccatgaacatggtaaaggttcctgagtgccggctggcagatgagttaggaggactgtgggagaattcccggttcacagactgctgcttgtgtgttgccggccaggaattccaggctcacaaggctatcttagcagctcgttctccggtttttagtgccatgtttgaacatgaaatggaggagagcaaaaagaatcgagttgaaatcaatgatgtggagcctgaagtttttaaggaaatgatgtgcttcatttacacggggaaggctccaaacctcgacaaaatggctgatgatttgctggcagctgctgacaagtatgccctggagcgcttaaaggtcatgtgtgaggatgccctctgcagtaacctgtccgtggagaacgctgcagaaattctcatcctggccgacctccacagtgcagatcagttgaaaactcaggcagtggatttcatcaactatcatgcttcggatgtcttggagacctctgggtggaagtcaatggtggtgtcacatccccacttggtggctgaggcataccgctctctggcttcagcacagtgcccttttctgggacccccacgcaaacgcctgaagcaatccggcagcggcagcccggcggcgaaacgcgtgaaactggat

SEQ ID NO: 1602 - DNA, 1104 bp, synthetic construct
  source 1..1104: mol_type = other DNA; note = VL12.3-(GS)1-SPOP-NLS-HA nucleic acid
atgggcagccaacctgtgctgacacagagccccagcgtgtccgccgctcctcggcagcgggtgaccatcagcgtgtccggctctaatagcaacatcggctccaacaccgtgaactggatccagcagctgcctggaagagcccccgagctgctgatgtacgacgacgacctgctcgccccaggcgtgtctgatagattcagcggctctagaagcggcaccagcgccagcctgaccatcagcggactgcagtctgaagatgaggccgactactacgccgctacatgggacgatagcctgaacggctgggtgttcggcggcggaacaaaggtgaccgtcctgagcggcggcagcaacgggcttctccctgatgacaagcttaccctcttctgcgaggtgagtgttgtgcaagattctgtcaacatttctggccagaataccatgaacatggtaaaggttcctgagtgccggctggcagatgagttaggaggactgtgggagaattcccggttcacagactgctgcttgtgtgttgccggccaggaattccaggctcacaaggctatcttagcagctcgttctccggtttttagtgccatgtttgaacatgaaatggaggagagcaaaaagaatcgagttgaaatcaatgatgtggagcctgaagtttttaaggaaatgatgtgcttcatttacacggggaaggctccaaacctcgacaaaatggctgatgatttgctggcagctgctgacaagtatgccctggagcgcttaaaggtcatgtgtgaggatgccctctgcagtaacctgtccgtggagaacgctgcagaaattctcatcctggccgacctccacagtgcagatcagttgaaaactcaggcagtggatttcatcaactatcatgcttcggatgtcttggagacctctgggtggaagtcaatggtggtgtcacatccccacttggtggctgaggcataccgctctctggcttcagcacagtgcccttttctgggacccccacgcaaacgcctgaagcaatccggcagcggcagcccggcggcgaaacgcgtgaaactggattacccatacgatgttccagattacgcttaa

SEQ ID NO: 1603 - DNA, 1110 bp, synthetic construct
  source 1..1110: mol_type = other DNA; note = VL12.3-(GS)2-SPOP-NLS-HA nucleic acid
atgggcagccaacctgtgctgacacagagccccagcgtgtccgccgctcctcggcagcgggtgaccatcagcgtgtccggctctaatagcaacatcggctccaacaccgtgaactggatccagcagctgcctggaagagcccccgagctgctgatgtacgacgacgacctgctcgccccaggcgtgtctgatagattcagcggctctagaagcggcaccagcgccagcctgaccatcagcggactgcagtctgaagatgaggccgactactacgccgctacatgggacgatagcctgaacggctgggtgttcggcggcggaacaaaggtgaccgtcctgagcggcggcagcggcagcaacgggcttctccctgatgacaagcttaccctcttctgcgaggtgagtgttgtgcaagattctgtcaacatttctggccagaataccatgaacatggtaaaggttcctgagtgccggctggcagatgagttaggaggactgtgggagaattcccggttcacagactgctgcttgtgtgttgccggccaggaattccaggctcacaaggctatcttagcagctcgttctccggtttttagtgccatgtttgaacatgaaatggaggagagcaaaaagaatcgagttgaaatcaatgatgtggagcctgaagtttttaaggaaatgatgtgcttcatttacacggggaaggctccaaacctcgacaaaatggctgatgatttgctggcagctgctgacaagtatgccctggagcgcttaaaggtcatgtgtgaggatgccctctgcagtaacctgtccgtggagaacgctgcagaaattctcatcctggccgacctccacagtgcagatcagttgaaaactcaggcagtggatttcatcaactatcatgcttcggatgtcttggagacctctgggtggaagtcaatggtggtgtcacatccccacttggtggctgaggcataccgctctctggcttcagcacagtgcccttttctgggacccccacgcaaacgcctgaagcaatccggcagcggcagcccggcggcgaaacgcgtgaaactggattacccatacgatgttccagattacgcttaa

SEQ ID NO: 1604 - DNA, 1116 bp, synthetic construct
  source 1..1116: mol_type = other DNA; note = VL12.3-(GS)3-SPOP-NLS-HA nucleic acid
atgggcagccaacctgtgctgacacagagccccagcgtgtccgccgctcctcggcagcgggtgaccatcagcgtgtccggctctaatagcaacatcggctccaacaccgtgaactggatccagcagctgcctggaagagcccccgagctgctgatgtacgacgacgacctgctcgccccaggcgtgtctgatagattcagcggctctagaagcggcaccagcgccagcctgaccatcagcggactgcagtctgaagatgaggccgactactacgccgctacatgggacgatagcctgaacggctgggtgttcggcggcggaacaaaggtgaccgtcctgagcggcggcagcggcagcggcagcaacgggcttctccctgatgacaagcttaccctcttctgcgaggtgagtgttgtgcaagattctgtcaacatttctggccagaataccatgaacatggtaaaggttcctgagtgccggctggcagatgagttaggaggactgtgggagaattcccggttcacagactgctgcttgtgtgttgccggccaggaattccaggctcacaaggctatcttagcagctcgttctccggtttttagtgccatgtttgaacatgaaatggaggagagcaaaaagaatcgagttgaaatcaatgatgtggagcctgaagtttttaaggaaatgatgtgcttcatttacacggggaaggctccaaacctcgacaaaatggctgatgatttgctggcagctgctgacaagtatgccctggagcgcttaaaggtcatgtgtgaggatgccctctgcagtaacctgtccgtggagaacgctgcagaaattctcatcctggccgacctccacagtgcagatcagttgaaaactcaggcagtggatttcatcaactatcatgcttcggatgtcttggagacctctgggtggaagtcaatggtggtgtcacatccccacttggtggctgaggcataccgctctctggcttcagcacagtgcccttttctgggacccccacgcaaacgcctgaagcaatccggcagcggcagcccggcggcgaaacgcgtgaaactggattacccatacgatgttccagattacgcttaa

SEQ ID NO: 1605 - DNA, 1122 bp, synthetic construct
  source 1..1122: mol_type = other DNA; note = VL12.3-(GS)4-SPOP-NLS-HA nucleic acid
atgggcagccaacctgtgctgacacagagccccagcgtgtccgccgctcctcggcagcgggtgaccatcagcgtgtccggctctaatagcaacatcggctccaacaccgtgaactggatccagcagctgcctggaagagcccccgagctgctgatgtacgacgacgacctgctcgccccaggcgtgtctgatagattcagcggctctagaagcggcaccagcgccagcctgaccatcagcggactgcagtctgaagatgaggccgactactacgccgctacatgggacgatagcctgaacggctgggtgttcggcggcggaacaaaggtgaccgtcctgagcggcggcagcggcagcggcagcggcagcaacgggcttctccctgatgacaagcttaccctcttctgcgaggtgagtgttgtgcaagattctgtcaacatttctggccagaataccatgaacatggtaaaggttcctgagtgccggctggcagatgagttaggaggactgtgggagaattcccggttcacagactgctgcttgtgtgttgccggccaggaattccaggctcacaaggctatcttagcagctcgttctccggtttttagtgccatgtttgaacatgaaatggaggagagcaaaaagaatcgagttgaaatcaatgatgtggagcctgaagtttttaaggaaatgatgtgcttcatttacacggggaaggctccaaacctcgacaaaatggctgatgatttgctggcagctgctgacaagtatgccctggagcgcttaaaggtcatgtgtgaggatgccctctgcagtaacctgtccgtggagaacgctgcagaaattctcatcctggccgacctccacagtgcagatcagttgaaaactcaggcagtggatttcatcaactatcatgcttcggatgtcttggagacctctgggtggaagtcaatggtggtgtcacatccccacttggtggctgaggcataccgctctctggcttcagcacagtgcccttttctgggacccccacgcaaacgcctgaagcaatccggcagcggcagcccggcggcgaaacgcgtgaaactggattacccatacgatgttccagattacgcttaa

SEQ ID NO: 1606 - DNA, 1128 bp, synthetic construct
  source 1..1128: mol_type = other DNA; note = VL12.3-(GS)5-SPOP-NLS-HA nucleic acid
atgggcagccaacctgtgctgacacagagccccagcgtgtccgccgctcctcggcagcgggtgaccatcagcgtgtccggctctaatagcaacatcggctccaacaccgtgaactggatccagcagctgcctggaagagcccccgagctgctgatgtacgacgacgacctgctcgccccaggcgtgtctgatagattcagcggctctagaagcggcaccagcgccagcctgaccatcagcggactgcagtctgaagatgaggccgactactacgccgctacatgggacgatagcctgaacggctgggtgttcggcggcggaacaaaggtgaccgtcctgagcggcggcagcggcagcggcagcggcagcggcagcaacgggcttctccctgatgacaagcttaccctcttctgcgaggtgagtgttgtgcaagattctgtcaacatttctggccagaataccatgaacatggtaaaggttcctgagtgccggctggcagatgagttaggaggactgtgggagaattcccggttcacagactgctgcttgtgtgttgccggccaggaattccaggctcacaaggctatcttagcagctcgttctccggtttttagtgccatgtttgaacatgaaatggaggagagcaaaaagaatcgagttgaaatcaatgatgtggagcctgaagtttttaaggaaatgatgtgcttcatttacacggggaaggctccaaacctcgacaaaatggctgatgatttgctggcagctgctgacaagtatgccctggagcgcttaaaggtcatgtgtgaggatgccctctgcagtaacctgtccgtggagaacgctgcagaaattctcatcctggccgacctccacagtgcagatcagttgaaaactcaggcagtggatttcatcaactatcatgcttcggatgtcttggagacctctgggtggaagtcaatggtggtgtcacatccccacttggtggctgaggcataccgctctctggcttcagcacagtgcccttttctgggacccccacgcaaacgcctgaagcaatccggcagcggcagcccggcggcgaaacgcgtgaaactggattacccatacgatgttccagattacgcttaa

SEQ ID NO: 1607 - DNA, 1134 bp, synthetic construct
  source 1..1134: mol_type = other DNA; note = VL12.3-(GS)6-SPOP-NLS-HA nucleic acid
atgggcagccaacctgtgctgacacagagccccagcgtgtccgccgctcctcggcagcgggtgaccatcagcgtgtccggctctaatagcaacatcggctccaacaccgtgaactggatccagcagctgcctggaagagcccccgagctgctgatgtacgacgacgacctgctcgccccaggcgtgtctgatagattcagcggctctagaagcggcaccagcgccagcctgaccatcagcggactgcagtctgaagatgaggccgactactacgccgctacatgggacgatagcctgaacggctgggtgttcggcggcggaacaaaggtgaccgtcctgagcggcggcagcggcagcggcagcggcagcggcagcggcagcaacgggcttctccctgatgacaagcttaccctcttctgcgaggtgagtgttgtgcaagattctgtcaacatttctggccagaataccatgaacatggtaaaggttcctgagtgccggctggcagatgagttaggaggactgtgggagaattcccggttcacagactgctgcttgtgtgttgccggccaggaattccaggctcacaaggctatcttagcagctcgttctccggtttttagtgccatgtttgaacatgaaatggaggagagcaaaaagaatcgagttgaaatcaatgatgtggagcctgaagtttttaaggaaatgatgtgcttcatttacacggggaaggctccaaacctcgacaaaatggctgatgatttgctggcagctgctgacaagtatgccctggagcgcttaaaggtcatgtgtgaggatgccctctgcagtaacctgtccgtggagaacgctgcagaaattctcatcctggccgacctccacagtgcagatcagttgaaaactcaggcagtggatttcatcaactatcatgcttcggatgtcttggagacctctgggtggaagtcaatggtggtgtcacatccccacttggtggctgaggcataccgctctctggcttcagcacagtgcccttttctgggacccccacgcaaacgcctgaagcaatccggcagcggcagcccggcggcgaaacgcgtgaaactggattacccatacgatgttccagattacgcttaa

SEQ ID NO: 1608 - DNA, 891 bp, synthetic construct
  source 1..891: mol_type = other DNA; note = VL12.3-(GS)1-CHIP nucleic acid
atgggcagccaacctgtgctgacacagagccccagcgtgtccgccgctcctcggcagcgggtgaccatcagcgtgtccggctctaatagcaacatcggctccaacaccgtgaactggatccagcagctgcctggaagagcccccgagctgctgatgtacgacgacgacctgctcgccccaggcgtgtctgatagattcagcggctctagaagcggcaccagcgccagcctgaccatcagcggactgcagtctgaagatgaggccgactactacgccgctacatgggacgatagcctgaacggctgggtgttcggcggcggaacaaaggtgaccgtcctgagcggcggcagccggctgaacttcggggacgacatccccagcgctcttcgaatcgcgaagaagaagcgctggaacagcattgaggagcggcgcatccaccaggagagcgagctgcactcctacctctccaggctcattgccgcggagcgtgagagggagctggaagagtgccagcgaaaccacgagggtgatgaggacgacagccacgtccgggcccagcaggcctgcattgaggccaagcacgacaagtacatggcggacatggacgagcttttttctcaggtggatgagaagaggaagaagcgagacatccccgactacctgtgtggcaagatcagctttgagctgatgcgggagccgtgcatcacgcccagtggcatcacctacgaccgcaaggacatcgaggagcacctgcagcgtgtgggtcattttgacccggtgaccaggagccccctgacccaggaacagctcatccccaacttggctatgaaggaggttattgacgcattcatctctgagaatggctgggtggaggactacggcagcggcagc

SEQ ID NO: 1609 - DNA, 897 bp, synthetic construct
  source 1..897: mol_type = other DNA; note = VL12.3-(GS)2-CHIP nucleic acid
atgggcagccaacctgtgctgacacagagccccagcgtgtccgccgctcctcggcagcgggtgaccatcagcgtgtccggctctaatagcaacatcggctccaacaccgtgaactggatccagcagctgcctggaagagcccccgagctgctgatgtacgacgacgacctgctcgccccaggcgtgtctgatagattcagcggctctagaagcggcaccagcgccagcctgaccatcagcggactgcagtctgaagatgaggccgactactacgccgctacatgggacgatagcctgaacggctgggtgttcggcggcggaacaaaggtgaccgtcctgagcggcggcagcggcagccggctgaacttcggggacgacatccccagcgctcttcgaatcgcgaagaagaagcgctggaacagcattgaggagcggcgcatccaccaggagagcgagctgcactcctacctctccaggctcattgccgcggagcgtgagagggagctggaagagtgccagcgaaaccacgagggtgatgaggacgacagccacgtccgggcccagcaggcctgcattgaggccaagcacgacaagtacatggcggacatggacgagcttttttctcaggtggatgagaagaggaagaagcgagacatccccgactacctgtgtggcaagatcagctttgagctgatgcgggagccgtgcatcacgcccagtggcatcacctacgaccgcaaggacatcgaggagcacctgcagcgtgtgggtcattttgacccggtgaccaggagccccctgacccaggaacagctcatccccaacttggctatgaaggaggttattgacgcattcatctctgagaatggctgggtggaggactacggcagcggcagc

SEQ ID NO: 1610 - DNA, 903 bp, synthetic construct
  source 1..903: mol_type = other DNA; note = VL12.3-(GS)3-CHIP nucleic acid
atgggcagccaacctgtgctgacacagagccccagcgtgtccgccgctcctcggcagcgggtgaccatcagcgtgtccggctctaatagcaacatcggctccaacaccgtgaactggatccagcagctgcctggaagagcccccgagctgctgatgtacgacgacgacctgctcgccccaggcgtgtctgatagattcagcggctctagaagcggcaccagcgccagcctgaccatcagcggactgcagtctgaagatgaggccgactactacgccgctacatgggacgatagcctgaacggctgggtgttcggcggcggaacaaaggtgaccgtcctgagcggcggcagcggcagcggcagccggctgaacttcggggacgacatccccagcgctcttcgaatcgcgaagaagaagcgctggaacagcattgaggagcggcgcatccaccaggagagcgagctgcactcctacctctccaggctcattgccgcggagcgtgagagggagctggaagagtgccagcgaaaccacgagggtgatgaggacgacagccacgtccgggcccagcaggcctgcattgaggccaagcacgacaagtacatggcggacatggacgagcttttttctcaggtggatgagaagaggaagaagcgagacatccccgactacctgtgtggcaagatcagctttgagctgatgcgggagccgtgcatcacgcccagtggcatcacctacgaccgcaaggacatcgaggagcacctgcagcgtgtgggtcattttgacccggtgaccaggagccccctgacccaggaacagctcatccccaacttggctatgaaggaggttattgacgcattcatctctgagaatggctgggtggaggactacggcagcggcagc

SEQ ID NO: 1611 - DNA, 909 bp, synthetic construct
  source 1..909: mol_type = other DNA; note = VL12.3-(GS)4-CHIP nucleic acid
atgggcagccaacctgtgctgacacagagccccagcgtgtccgccgctcctcggcagcgggtgaccatcagcgtgtccggctctaatagcaacatcggctccaacaccgtgaactggatccagcagctgcctggaagagcccccgagctgctgatgtacgacgacgacctgctcgccccaggcgtgtctgatagattcagcggctctagaagcggcaccagcgccagcctgaccatcagcggactgcagtctgaagatgaggccgactactacgccgctacatgggacgatagcctgaacggctgggtgttcggcggcggaacaaaggtgaccgtcctgagcggcggcagcggcagcggcagcggcagccggctgaacttcggggacgacatccccagcgctcttcgaatcgcgaagaagaagcgctggaacagcattgaggagcggcgcatccaccaggagagcgagctgcactcctacctctccaggctcattgccgcggagcgtgagagggagctggaagagtgccagcgaaaccacgagggtgatgaggacgacagccacgtccgggcccagcaggcctgcattgaggccaagcacgacaagtacatggcggacatggacgagcttttttctcaggtggatgagaagaggaagaagcgagacatccccgactacctgtgtggcaagatcagctttgagctgatgcgggagccgtgcatcacgcccagtggcatcacctacgaccgcaaggacatcgaggagcacctgcagcgtgtgggtcattttgacccggtgaccaggagccccctgacccaggaacagctcatccccaacttggctatgaaggaggttattgacgcattcatctctgagaatggctgggtggaggactacggcagcggcagc

SEQ ID NO: 1612 - DNA, 915 bp, synthetic construct
  source 1..915: mol_type = other DNA; note = VL12.3-(GS)5-CHIP nucleic acid
atgggcagccaacctgtgctgacacagagccccagcgtgtccgccgctcctcggcagcgggtgaccatcagcgtgtccggctctaatagcaacatcggctccaacaccgtgaactggatccagcagctgcctggaagagcccccgagctgctgatgtacgacgacgacctgctcgccccaggcgtgtctgatagattcagcggctctagaagcggcaccagcgccagcctgaccatcagcggactgcagtctgaagatgaggccgactactacgccgctacatgggacgatagcctgaacggctgggtgttcggcggcggaacaaaggtgaccgtcctgagcggcggcagcggcagcggcagcggcagcggcagccggctgaacttcggggacgacatccccagcgctcttcgaatcgcgaagaagaagcgctggaacagcattgaggagcggcgcatccaccaggagagcgagctgcactcctacctctccaggctcattgccgcggagcgtgagagggagctggaagagtgccagcgaaaccacgagggtgatgaggacgacagccacgtccgggcccagcaggcctgcattgaggccaagcacgacaagtacatggcggacatggacgagcttttttctcaggtggatgagaagaggaagaagcgagacatccccgactacctgtgtggcaagatcagctttgagctgatgcgggagccgtgcatcacgcccagtggcatcacctacgaccgcaaggacatcgaggagcacctgcagcgtgtgggtcattttgacccggtgaccaggagccccctgacccaggaacagctcatccccaacttggctatgaaggaggttattgacgcattcatctctgagaatggctgggtggaggactacggcagcggcagc

SEQ ID NO: 1613 - DNA, 921 bp, synthetic construct
  source 1..921: mol_type = other DNA; note = VL12.3-(GS)6-CHIP nucleic acid
atgggcagccaacctgtgctgacacagagccccagcgtgtccgccgctcctcggcagcgggtgaccatcagcgtgtccggctctaatagcaacatcggctccaacaccgtgaactggatccagcagctgcctggaagagcccccgagctgctgatgtacgacgacgacctgctcgccccaggcgtgtctgatagattcagcggctctagaagcggcaccagcgccagcctgaccatcagcggactgcagtctgaagatgaggccgactactacgccgctacatgggacgatagcctgaacggctgggtgttcggcggcggaacaaaggtgaccgtcctgagcggcggcagcggcagcggcagcggcagcggcagcggcagccggctgaacttcggggacgacatccccagcgctcttcgaatcgcgaagaagaagcgctggaacagcattgaggagcggcgcatccaccaggagagcgagctgcactcctacctctccaggctcattgccgcggagcgtgagagggagctggaagagtgccagcgaaaccacgagggtgatgaggacgacagccacgtccgggcccagcaggcctgcattgaggccaagcacgacaagtacatggcggacatggacgagcttttttctcaggtggatgagaagaggaagaagcgagacatccccgactacctgtgtggcaagatcagctttgagctgatgcgggagccgtgcatcacgcccagtggcatcacctacgaccgcaaggacatcgaggagcacctgcagcgtgtgggtcattttgacccggtgaccaggagccccctgacccaggaacagctcatccccaacttggctatgaaggaggttattgacgcattcatctctgagaatggctgggtggaggactacggcagcggcagc

SEQ ID NO: 1614 - DNA, 921 bp, synthetic construct
  source 1..921: mol_type = other DNA; note = VL12.3-(GS)1-CHIP-HA nucleic acid
atgggcagccaacctgtgctgacacagagccccagcgtgtccgccgctcctcggcagcgggtgaccatcagcgtgtccggctctaatagcaacatcggctccaacaccgtgaactggatccagcagctgcctggaagagcccccgagctgctgatgtacgacgacgacctgctcgccccaggcgtgtctgatagattcagcggctctagaagcggcaccagcgccagcctgaccatcagcggactgcagtctgaagatgaggccgactactacgccgctacatgggacgatagcctgaacggctgggtgttcggcggcggaacaaaggtgaccgtcctgagcggcggcagccggctgaacttcggggacgacatccccagcgctcttcgaatcgcgaagaagaagcgctggaacagcattgaggagcggcgcatccaccaggagagcgagctgcactcctacctctccaggctcattgccgcggagcgtgagagggagctggaagagtgccagcgaaaccacgagggtgatgaggacgacagccacgtccgggcccagcaggcctgcattgaggccaagcacgacaagtacatggcggacatggacgagcttttttctcaggtggatgagaagaggaagaagcgagacatccccgactacctgtgtggcaagatcagctttgagctgatgcgggagccgtgcatcacgcccagtggcatcacctacgaccgcaaggacatcgaggagcacctgcagcgtgtgggtcattttgacccggtgaccaggagccccctgacccaggaacagctcatccccaacttggctatgaaggaggttattgacgcattcatctctgagaatggctgggtggaggactacggcagcggcagctacccatacgatgttccagattacgcttaa

SEQ ID NO: 1615 - DNA, 927 bp, synthetic construct
  source 1..927: mol_type = other DNA; note = VL12.3-(GS)2-CHIP-HA nucleic acid
atgggcagccaacctgtgctgacacagagccccagcgtgtccgccgctcctcggcagcgggtgaccatcagcgtgtccggctctaatagcaacatcggctccaacaccgtgaactggatccagcagctgcctggaagagcccccgagctgctgatgtacgacgacgacctgctcgccccaggcgtgtctgatagattcagcggctctagaagcggcaccagcgccagcctgaccatcagcggactgcagtctgaagatgaggccgactactacgccgctacatgggacgatagcctgaacggctgggtgttcggcggcggaacaaaggtgaccgtcctgagcggcggcagcggcagccggctgaacttcggggacgacatccccagcgctcttcgaatcgcgaagaagaagcgctggaacagcattgaggagcggcgcatccaccaggagagcgagctgcactcctacctctccaggctcattgccgcggagcgtgagagggagctggaagagtgccagcgaaaccacgagggtgatgaggacgacagccacgtccgggcccagcaggcctgcattgaggccaagcacgacaagtacatggcggacatggacgagcttttttctcaggtggatgagaagaggaagaagcgagacatccccgactacctgtgtggcaagatcagctttgagctgatgcgggagccgtgcatcacgcccagtggcatcacctacgaccgcaaggacatcgaggagcacctgcagcgtgtgggtcattttgacccggtgaccaggagccccctgacccaggaacagctcatccccaacttggctatgaaggaggttattgacgcattcatctctgagaatggctgggtggaggactacggcagcggcagctacccatacgatgttccagattacgcttaa

SEQ ID NO: 1616 - DNA, 933 bp, synthetic construct
  source 1..933: mol_type = other DNA; note = VL12.3-(GS)3-CHIP-HA nucleic acid
atgggcagccaacctgtgctgacacagagccccagcgtgtccgccgctcctcggcagcgggtgaccatcagcgtgtccggctctaatagcaacatcggctccaacaccgtgaactggatccagcagctgcctggaagagcccccgagctgctgatgtacgacgacgacctgctcgccccaggcgtgtctgatagattcagcggctctagaagcggcaccagcgccagcctgaccatcagcggactgcagtctgaagatgaggccgactactacgccgctacatgggacgatagcctgaacggctgggtgttcggcggcggaacaaaggtgaccgtcctgagcggcggcagcggcagcggcagccggctgaacttcggggacgacatccccagcgctcttcgaatcgcgaagaagaagcgctggaacagcattgaggagcggcgcatccaccaggagagcgagctgcactcctacctctccaggctcattgccgcggagcgtgagagggagctggaagagtgccagcgaaaccacgagggtgatgaggacgacagccacgtccgggcccagcaggcctgcattgaggccaagcacgacaagtacatggcggacatggacgagcttttttctcaggtggatgagaagaggaagaagcgagacatccccgactacctgtgtggcaagatcagctttgagctgatgcgggagccgtgcatcacgcccagtggcatcacctacgaccgcaaggacatcgaggagcacctgcagcgtgtgggtcattttgacccggtgaccaggagccccctgacccaggaacagctcatccccaacttggctatgaaggaggttattgacgcattcatctctgagaatggctgggtggaggactacggcagcggcagctacccatacgatgttccagattacgcttaa

SEQ ID NO: 1617 - DNA, 939 bp, synthetic construct
  source 1..939: mol_type = other DNA; note = VL12.3-(GS)4-CHIP-HA nucleic acid
atgggcagccaacctgtgctgacacagagccccagcgtgtccgccgctcctcggcagcgggtgaccatcagcgtgtccggctctaatagcaacatcggctccaacaccgtgaactggatccagcagctgcctggaagagcccccgagctgctgatgtacgacgacgacctgctcgccccaggcgtgtctgatagattcagcggctctagaagcggcaccagcgccagcctgaccatcagcggactgcagtctgaagatgaggccgactactacgccgctacatgggacgatagcctgaacggctgggtgttcggcggcggaacaaaggtgaccgtcctgagcggcggcagcggcagcggcagcggcagccggctgaacttcggggacgacatccccagcgctcttcgaatcgcgaagaagaagcgctggaacagcattgaggagcggcgcatccaccaggagagcgagctgcactcctacctctccaggctcattgccgcggagcgtgagagggagctggaagagtgccagcgaaaccacgagggtgatgaggacgacagccacgtccgggcccagcaggcctgcattgaggccaagcacgacaagtacatggcggacatggacgagcttttttctcaggtggatgagaagaggaagaagcgagacatccccgactacctgtgtggcaagatcagctttgagctgatgcgggagccgtgcatcacgcccagtggcatcacctacgaccgcaaggacatcgaggagcacctgcagcgtgtgggtcattttgacccggtgaccaggagccccctgacccaggaacagctcatccccaacttggctatgaaggaggttattgacgcattcatctctgagaatggctgggtggaggactacggcagcggcagctacccatacgatgttccagattacgcttaa

SEQ ID NO: 1618 - DNA, 945 bp, synthetic construct
  source 1..945: mol_type = other DNA; note = VL12.3-(GS)5-CHIP-HA nucleic acid
atgggcagccaacctgtgctgacacagagccccagcgtgtccgccgctcctcggcagcgggtgaccatcagcgtgtccggctctaatagcaacatcggctccaacaccgtgaactggatccagcagctgcctggaagagcccccgagctgctgatgtacgacgacgacctgctcgccccaggcgtgtctgatagattcagcggctctagaagcggcaccagcgccagcctgaccatcagcggactgcagtctgaagatgaggccgactactacgccgctacatgggacgatagcctgaacggctgggtgttcggcggcggaacaaaggtgaccgtcctgagcggcggcagcggcagcggcagcggcagcggcagccggctgaacttcggggacgacatccccagcgctcttcgaatcgcgaagaagaagcgctggaacagcattgaggagcggcgcatccaccaggagagcgagctgcactcctacctctccaggctcattgccgcggagcgtgagagggagctggaagagtgccagcgaaaccacgagggtgatgaggacgacagccacgtccgggcccagcaggcctgcattgaggccaagcacgacaagtacatggcggacatggacgagcttttttctcaggtggatgagaagaggaagaagcgagacatccccgactacctgtgtggcaagatcagctttgagctgatgcgggagccgtgcatcacgcccagtggcatcacctacgaccgcaaggacatcgaggagcacctgcagcgtgtgggtcattttgacccggtgaccaggagccccctgacccaggaacagctcatccccaacttggctatgaaggaggttattgacgcattcatctctgagaatggctgggtggaggactacggcagcggcagctacccatacgatgttccagattacgcttaa

SEQ ID NO: 1619 - DNA, 951 bp, synthetic construct
  source 1..951: mol_type = other DNA; note = VL12.3-(GS)6-CHIP-HA nucleic acid
atgggcagccaacctgtgctgacacagagccccagcgtgtccgccgctcctcggcagcgggtgaccatcagcgtgtccggctctaatagcaacatcggctccaacaccgtgaactggatccagcagctgcctggaagagcccccgagctgctgatgtacgacgacgacctgctcgccccaggcgtgtctgatagattcagcggctctagaagcggcaccagcgccagcctgaccatcagcggactgcagtctgaagatgaggccgactactacgccgctacatgggacgatagcctgaacggctgggtgttcggcggcggaacaaaggtgaccgtcctgagcggcggcagcggcagcggcagcggcagcggcagcggcagccggctgaacttcggggacgacatccccagcgctcttcgaatcgcgaagaagaagcgctggaacagcattgaggagcggcgcatccaccaggagagcgagctgcactcctacctctccaggctcattgccgcggagcgtgagagggagctggaagagtgccagcgaaaccacgagggtgatgaggacgacagccacgtccgggcccagcaggcctgcattgaggccaagcacgacaagtacatggcggacatggacgagcttttttctcaggtggatgagaagaggaagaagcgagacatccccgactacctgtgtggcaagatcagctttgagctgatgcgggagccgtgcatcacgcccagtggcatcacctacgaccgcaaggacatcgaggagcacctgcagcgtgtgggtcattttgacccggtgaccaggagccccctgacccaggaacagctcatccccaacttggctatgaaggaggttattgacgcattcatctctgagaatggctgggtggaggactacggcagcggcagctacccatacgatgttccagattacgcttaa

SEQ ID NO: 1620 - DNA, 456 bp, synthetic construct
  source 1..456: mol_type = other DNA; note = DCAF1-(GS)1-VL12.3 nucleic acid
caggcgccgattaactttaccagccgcctgaaccgccgcgcgagctttccgaaatatggcggcgtggatggcggctgctttgatcgccatctgatttttagccgcggcagcggcagccaacctgtgctgacacagagccccagcgtgtccgccgctcctcggcagcgggtgaccatcagcgtgtccggctctaatagcaacatcggctccaacaccgtgaactggatccagcagctgcctggaagagcccccgagctgctgatgtacgacgacgacctgctcgccccaggcgtgtctgatagattcagcggctctagaagcggcaccagcgccagcctgaccatcagcggactgcagtctgaagatgaggccgactactacgccgctacatgggacgatagcctgaacggctgggtgttcggcggcggaacaaaggtgaccgtcctgagcggctaa

SEQ ID NO: 1621 - DNA, 462 bp, synthetic construct
  source 1..462: mol_type = other DNA; note = DCAF1-(GS)2-VL12.3 nucleic acid
caggcgccgattaactttaccagccgcctgaaccgccgcgcgagctttccgaaatatggcggcgtggatggcggctgctttgatcgccatctgatttttagccgcggcagcggcagcggcagccaacctgtgctgacacagagccccagcgtgtccgccgctcctcggcagcgggtgaccatcagcgtgtccggctctaatagcaacatcggctccaacaccgtgaactggatccagcagctgcctggaagagcccccgagctgctgatgtacgacgacgacctgctcgccccaggcgtgtctgatagattcagcggctctagaagcggcaccagcgccagcctgaccatcagcggactgcagtctgaagatgaggccgactactacgccgctacatgggacgatagcctgaacggctgggtgttcggcggcggaacaaaggtgaccgtcctgagcggctaa

SEQ ID NO: 1622 - DNA, 468 bp, synthetic construct
  source 1..468: mol_type = other DNA; note = DCAF1-(GS)3-VL12.3 nucleic acid
caggcgccgattaactttaccagccgcctgaaccgccgcgcgagctttccgaaatatggcggcgtggatggcggctgctttgatcgccatctgatttttagccgcggcagcggcagcggcagcggcagccaacctgtgctgacacagagccccagcgtgtccgccgctcctcggcagcgggtgaccatcagcgtgtccggctctaatagcaacatcggctccaacaccgtgaactggatccagcagctgcctggaagagcccccgagctgctgatgtacgacgacgacctgctcgccccaggcgtgtctgatagattcagcggctctagaagcggcaccagcgccagcctgaccatcagcggactgcagtctgaagatgaggccgactactacgccgctacatgggacgatagcctgaacggctgggtgttcggcggcggaacaaaggtgaccgtcctgagcggctaa

SEQ ID NO: 1623 - DNA, 474 bp, synthetic construct
  source 1..474: mol_type = other DNA; note = DCAF1-(GS)4-VL12.3 nucleic acid
caggcgccgattaactttaccagccgcctgaaccgccgcgcgagctttccgaaatatggcggcgtggatggcggctgctttgatcgccatctgatttttagccgcggcagcggcagcggcagcggcagcggcagccaacctgtgctgacacagagccccagcgtgtccgccgctcctcggcagcgggtgaccatcagcgtgtccggctctaatagcaacatcggctccaacaccgtgaactggatccagcagctgcctggaagagcccccgagctgctgatgtacgacgacgacctgctcgccccaggcgtgtctgatagattcagcggctctagaagcggcaccagcgccagcctgaccatcagcggactgcagtctgaagatgaggccgactactacgccgctacatgggacgatagcctgaacggctgggtgttcggcggcggaacaaaggtgaccgtcctgagcggctaa

SEQ ID NO: 1624 - DNA, 480 bp, synthetic construct
  source 1..480: mol_type = other DNA; note = DCAF1-(GS)5-VL12.3 nucleic acid
caggcgccgattaactttaccagccgcctgaaccgccgcgcgagctttccgaaatatggcggcgtggatggcggctgctttgatcgccatctgatttttagccgcggcagcggcagcggcagcggcagcggcagcggcagccaacctgtgctgacacagagccccagcgtgtccgccgctcctcggcagcgggtgaccatcagcgtgtccggctctaatagcaacatcggctccaacaccgtgaactggatccagcagctgcctggaagagcccccgagctgctgatgtacgacgacgacctgctcgccccaggcgtgtctgatagattcagcggctctagaagcggcaccagcgccagcctgaccatcagcggactgcagtctgaagatgaggccgactactacgccgctacatgggacgatagcctgaacggctgggtgttcggcggcggaacaaaggtgaccgtcctgagcggctaa

SEQ ID NO: 1625 - DNA, 486 bp, synthetic construct
  source 1..486: mol_type = other DNA; note = DCAF1-(GS)6-VL12.3 nucleic acid
caggcgccgattaactttaccagccgcctgaaccgccgcgcgagctttccgaaatatggcggcgtggatggcggctgctttgatcgccatctgatttttagccgcggcagcggcagcggcagcggcagcggcagcggcagcggcagccaacctgtgctgacacagagccccagcgtgtccgccgctcctcggcagcgggtgaccatcagcgtgtccggctctaatagcaacatcggctccaacaccgtgaactggatccagcagctgcctggaagagcccccgagctgctgatgtacgacgacgacctgctcgccccaggcgtgtctgatagattcagcggctctagaagcggcaccagcgccagcctgaccatcagcggactgcagtctgaagatgaggccgactactacgccgctacatgggacgatagcctgaacggctgggtgttcggcggcggaacaaaggtgaccgtcctgagcggctaa

SEQ ID NO: 1626 - DNA, 504 bp, synthetic construct
  source 1..504: mol_type = other DNA; note = HA-DCAF1-(GS)1-VL12.3 nucleic acid
atgtacccatacgatgttccagattacgctggcagcggcagcggcagccaggcgccgattaactttaccagccgcctgaaccgccgcgcgagctttccgaaatatggcggcgtggatggcggctgctttgatcgccatctgatttttagccgcggcagcggcagccaacctgtgctgacacagagccccagcgtgtccgccgctcctcggcagcgggtgaccatcagcgtgtccggctctaatagcaacatcggctccaacaccgtgaactggatccagcagctgcctggaagagcccccgagctgctgatgtacgacgacgacctgctcgccccaggcgtgtctgatagattcagcggctctagaagcggcaccagcgccagcctgaccatcagcggactgcagtctgaagatgaggccgactactacgccgctacatgggacgatagcctgaacggctgggtgttcggcggcggaacaaaggtgaccgtcctgagcggctaa

SEQ ID NO: 1627 - DNA, 510 bp, synthetic construct
  source 1..510: mol_type = other DNA; note = HA-DCAF1-(GS)2-VL12.3 nucleic acid
atgtacccatacgatgttccagattacgctggcagcggcagcggcagccaggcgccgattaactttaccagccgcctgaaccgccgcgcgagctttccgaaatatggcggcgtggatggcggctgctttgatcgccatctgatttttagccgcggcagcggcagcggcagccaacctgtgctgacacagagccccagcgtgtccgccgctcctcggcagcgggtgaccatcagcgtgtccggctctaatagcaacatcggctccaacaccgtgaactggatccagcagctgcctggaagagcccccgagctgctgatgtacgacgacgacctgctcgccccaggcgtgtctgatagattcagcggctctagaagcggcaccagcgccagcctgaccatcagcggactgcagtctgaagatgaggccgactactacgccgctacatgggacgatagcctgaacggctgggtgttcggcggcggaacaaaggtgaccgtcctgagcggctaa

SEQ ID NO: 1628 - DNA, 516 bp, synthetic construct
  source 1..516: mol_type = other DNA; note = HA-DCAF1-(GS)3-VL12.3 nucleic acid
atgtacccatacgatgttccagattacgctggcagcggcagcggcagccaggcgccgattaactttaccagccgcctgaaccgccgcgcgagctttccgaaatatggcggcgtggatggcggctgctttgatcgccatctgatttttagccgcggcagcggcagcggcagcggcagccaacctgtgctgacacagagccccagcgtgtccgccgctcctcggcagcgggtgaccatcagcgtgtccggctctaatagcaacatcggctccaacaccgtgaactggatccagcagctgcctggaagagcccccgagctgctgatgtacgacgacgacctgctcgccccaggcgtgtctgatagattcagcggctctagaagcggcaccagcgccagcctgaccatcagcggactgcagtctgaagatgaggccgactactacgccgctacatgggacgatagcctgaacggctgggtgttcggcggcggaacaaaggtgaccgtcctgagcggctaa

SEQ ID NO: 1629 - DNA, 522 bp, synthetic construct
  source 1..522: mol_type = other DNA; note = HA-DCAF1-(GS)4-VL12.3 nucleic acid
atgtacccatacgatgttccagattacgctggcagcggcagcggcagccaggcgccgattaactttaccagccgcctgaaccgccgcgcgagctttccgaaatatggcggcgtggatggcggctgctttgatcgccatctgatttttagccgcggcagcggcagcggcagcggcagcggcagccaacctgtgctgacacagagccccagcgtgtccgccgctcctcggcagcgggtgaccatcagcgtgtccggctctaatagcaacatcggctccaacaccgtgaactggatccagcagctgcctggaagagcccccgagctgctgatgtacgacgacgacctgctcgccccaggcgtgtctgatagattcagcggctctagaagcggcaccagcgccagcctgaccatcagcggactgcagtctgaagatgaggccgactactacgccgctacatgggacgatagcctgaacggctgggtgttcggcggcggaacaaaggtgaccgtcctgagcggctaa

SEQ ID NO: 1630 - DNA, 528 bp, synthetic construct
  source 1..528: mol_type = other DNA; note = HA-DCAF1-(GS)5-VL12.3 nucleic acid
atgtacccatacgatgttccagattacgctggcagcggcagcggcagccaggcgccgattaactttaccagccgcctgaaccgccgcgcgagctttccgaaatatggcggcgtggatggcggctgctttgatcgccatctgatttttagccgcggcagcggcagcggcagcggcagcggcagcggcagccaacctgtgctgacacagagccccagcgtgtccgccgctcctcggcagcgggtgaccatcagcgtgtccggctctaatagcaacatcggctccaacaccgtgaactggatccagcagctgcctggaagagcccccgagctgctgatgtacgacgacgacctgctcgccccaggcgtgtctgatagattcagcggctctagaagcggcaccagcgccagcctgaccatcagcggactgcagtctgaagatgaggccgactactacgccgctacatgggacgatagcctgaacggctgggtgttcggcggcggaacaaaggtgaccgtcctgagcggctaa

SEQ ID NO: 1631 - DNA, 534 bp, synthetic construct
  source 1..534: mol_type = other DNA; note = HA-DCAF1-(GS)6-VL12.3 nucleic acid
atgtacccatacgatgttccagattacgctggcagcggcagcggcagccaggcgccgattaactttaccagccgcctgaaccgccgcgcgagctttccgaaatatggcggcgtggatggcggctgctttgatcgccatctgatttttagccgcggcagcggcagcggcagcggcagcggcagcggcagcggcagccaacctgtgctgacacagagccccagcgtgtccgccgctcctcggcagcgggtgaccatcagcgtgtccggctctaatagcaacatcggctccaacaccgtgaactggatccagcagctgcctggaagagcccccgagctgctgatgtacgacgacgacctgctcgccccaggcgtgtctgatagattcagcggctctagaagcggcaccagcgccagcctgaccatcagcggactgcagtctgaagatgaggccgactactacgccgctacatgggacgatagcctgaacggctgggtgttcggcggcggaacaaaggtgaccgtcctgagcggctaa

SEQ ID NO: 1632 - DNA, 1419 bp, synthetic construct
  source 1..1419: mol_type = other DNA; note = VL12.3-(GS)1-E6AP nucleic acid
ggcagccaacctgtgctgacacagagccccagcgtgtccgccgctcctcggcagcgggtgaccatcagcgtgtccggctctaatagcaacatcggctccaacaccgtgaactggatccagcagctgcctggaagagcccccgagctgctgatgtacgacgacgacctgctcgccccaggcgtgtctgatagattcagcggctctagaagcggcaccagcgccagcctgaccatcagcggactgcagtctgaagatgaggccgactactacgccgctacatgggacgatagcctgaacggctgggtgttcggcggcggaacaaaggtgaccgtcctgagcggcggcagcaatccatatttgagactcaaagttagacgtgaccatatcatagatgatgcacttgtccggctagagatgatcgctatggaaaatcctgcagacttgaagaagcagttgtatgtggaatttgaaggagaacaaggagttgatgagggaggtgtttccaaagaattttttcagctggttgtggaggaaatcttcaatccagatattggtatgttcacatacgatgaatctacaaaattgttttggtttaatccatcttcttttgaaactgagggtcagtttactctgattggcatagtactgggtctggctatttacaataactgtatactggatgtacattttcccatggttgtctacaggaagctaatggggaaaaaaggaacttttcgtgacttgggagactctcacccagttctatatcagagtttaaaagatttattggagtatgaagggaatgtggaagatgacatgatgatcactttccagatatcacagacagatctttttggtaacccaatgatgtatgatctaaaggaaaatggtgataaaattccaattacaaatgaaaacaggaaggaatttgtcaatctttattctgactacattctcaataaatcagtagaaaaacagttcaaggcttttcggagaggttttcatatggtgaccaatgaatctcccttaaagtacttattcagaccagaagaaattgaattgcttatatgtggaagccggaatctagatttccaagcactagaagaaactacagaatatgacggtggctataccagggactctgttctgattagggagttctgggaaatcgttcattcatttacagatgaacagaaaagactcttcttgcagtttacaacgggcacagacagagcacctgtgggaggactaggaaaattaaagatgattatagccaaaaatggcccagacacagaaaggttacctacatctcatacttgctttaatgtgcttttacttccggaatactcaagcaaagaaaaacttaaagagagattgttgaaggccatcacgtatgccaaaggatttggcatgctgtaa

SEQ ID NO: 1633 - DNA, 1425 bp, synthetic construct
  source 1..1425: mol_type = other DNA; note = VL12.3-(GS)2-E6AP nucleic acid
ggcagccaacctgtgctgacacagagccccagcgtgtccgccgctcctcggcagcgggtgaccatcagcgtgtccggctctaatagcaacatcggctccaacaccgtgaactggatccagcagctgcctggaagagcccccgagctgctgatgtacgacgacgacctgctcgccccaggcgtgtctgatagattcagcggctctagaagcggcaccagcgccagcctgaccatcagcggactgcagtctgaagatgaggccgactactacgccgctacatgggacgatagcctgaacggctgggtgttcggcggcggaacaaaggtgaccgtcctgagcggcggcagcggcagcaatccatatttgagactcaaagttagacgtgaccatatcatagatgatgcacttgtccggctagagatgatcgctatggaaaatcctgcagacttgaagaagcagttgtatgtggaatttgaaggagaacaaggagttgatgagggaggtgtttccaaagaattttttcagctggttgtggaggaaatcttcaatccagatattggtatgttcacatacgatgaatctacaaaattgttttggtttaatccatcttcttttgaaactgagggtcagtttactctgattggcatagtactgggtctggctatttacaataactgtatactggatgtacattttcccatggttgtctacaggaagctaatggggaaaaaaggaacttttcgtgacttgggagactctcacccagttctatatcagagtttaaaagatttattggagtatgaagggaatgtggaagatgacatgatgatcactttccagatatcacagacagatctttttggtaacccaatgatgtatgatctaaaggaaaatggtgataaaattccaattacaaatgaaaacaggaaggaatttgtcaatctttattctgactacattctcaataaatcagtagaaaaacagttcaaggcttttcggagaggttttcatatggtgaccaatgaatctcccttaaagtacttattcagaccagaagaaattgaattgcttatatgtggaagccggaatctagatttccaagcactagaagaaactacagaatatgacggtggctataccagggactctgttctgattagggagttctgggaaatcgttcattcatttacagatgaacagaaaagactcttcttgcagtttacaacgggcacagacagagcacctgtgggaggactaggaaaattaaagatgattatagccaaaaatggcccagacacagaaaggttacctacatctcatacttgctttaatgtgcttttacttccggaatactcaagcaaagaaaaacttaaagagagattgttgaaggccatcacgtatgccaaaggatttggcatgctgtaa

SEQ ID NO: 1634 - DNA, 1431 bp, synthetic construct
  source 1..1431: mol_type = other DNA; note = VL12.3-(GS)3-E6AP nucleic acid
ggcagccaacctgtgctgacacagagccccagcgtgtccgccgctcctcggcagcgggtgaccatcagcgtgtccggctctaatagcaacatcggctccaacaccgtgaactggatccagcagctgcctggaagagcccccgagctgctgatgtacgacgacgacctgctcgccccaggcgtgtctgatagattcagcggctctagaagcggcaccagcgccagcctgaccatcagcggactgcagtctgaagatgaggccgactactacgccgctacatgggacgatagcctgaacggctgggtgttcggcggcggaacaaaggtgaccgtcctgagcggcggcagcggcagcggcagcaatccatatttgagactcaaagttagacgtgaccatatcatagatgatgcacttgtccggctagagatgatcgctatggaaaatcctgcagacttgaagaagcagttgtatgtggaatttgaaggagaacaaggagttgatgagggaggtgtttccaaagaattttttcagctggttgtggaggaaatcttcaatccagatattggtatgttcacatacgatgaatctacaaaattgttttggtttaatccatcttcttttgaaactgagggtcagtttactctgattggcatagtactgggtctggctatttacaataactgtatactggatgtacattttcccatggttgtctacaggaagctaatggggaaaaaaggaacttttcgtgacttgggagactctcacccagttctatatcagagtttaaaagatttattggagtatgaagggaatgtggaagatgacatgatgatcactttccagatatcacagacagatctttttggtaacccaatgatgtatgatctaaaggaaaatggtgataaaattccaattacaaatgaaaacaggaaggaatttgtcaatctttattctgactacattctcaataaatcagtagaaaaacagttcaaggcttttcggagaggttttcatatggtgaccaatgaatctcccttaaagtacttattcagaccagaagaaattgaattgcttatatgtggaagccggaatctagatttccaagcactagaagaaactacagaatatgacggtggctataccagggactctgttctgattagggagttctgggaaatcgttcattcatttacagatgaacagaaaagactcttcttgcagtttacaacgggcacagacagagcacctgtgggaggactaggaaaattaaagatgattatagccaaaaatggcccagacacagaaaggttacctacatctcatacttgctttaatgtgcttttacttccggaatactcaagcaaagaaaaacttaaagagagattgttgaaggccatcacgtatgccaaaggatttggcatgctgtaa

SEQ ID NO: 1635 - DNA, 1437 bp, synthetic construct
  source 1..1437: mol_type = other DNA; note = VL12.3-(GS)4-E6AP nucleic acid
ggcagccaacctgtgctgacacagagccccagcgtgtccgccgctcctcggcagcgggtgaccatcagcgtgtccggctctaatagcaacatcggctccaacaccgtgaactggatccagcagctgcctggaagagcccccgagctgctgatgtacgacgacgacctgctcgccccaggcgtgtctgatagattcagcggctctagaagcggcaccagcgccagcctgaccatcagcggactgcagtctgaagatgaggccgactactacgccgctacatgggacgatagcctgaacggctgggtgttcggcggcggaacaaaggtgaccgtcctgagcggcggcagcggcagcggcagcggcagcaatccatatttgagactcaaagttagacgtgaccatatcatagatgatgcacttgtccggctagagatgatcgctatggaaaatcctgcagacttgaagaagcagttgtatgtggaatttgaaggagaacaaggagttgatgagggaggtgtttccaaagaattttttcagctggttgtggaggaaatcttcaatccagatattggtatgttcacatacgatgaatctacaaaattgttttggtttaatccatcttcttttgaaactgagggtcagtttactctgattggcatagtactgggtctggctatttacaataactgtatactggatgtacattttcccatggttgtctacaggaagctaatggggaaaaaaggaacttttcgtgacttgggagactctcacccagttctatatcagagtttaaaagatttattggagtatgaagggaatgtggaagatgacatgatgatcactttccagatatcacagacagatctttttggtaacccaatgatgtatgatctaaaggaaaatggtgataaaattccaattacaaatgaaaacaggaaggaatttgtcaatctttattctgactacattctcaataaatcagtagaaaaacagttcaaggcttttcggagaggttttcatatggtgaccaatgaatctcccttaaagtacttattcagaccagaagaaattgaattgcttatatgtggaagccggaatctagatttccaagcactagaagaaactacagaatatgacggtggctataccagggactctgttctgattagggagttctgggaaatcgttcattcatttacagatgaacagaaaagactcttcttgcagtttacaacgggcacagacagagcacctgtgggaggactaggaaaattaaagatgattatagccaaaaatggcccagacacagaaaggttacctacatctcatacttgctttaatgtgcttttacttccggaatactcaagcaaagaaaaacttaaagagagattgttgaaggccatcacgtatgccaaaggatttggcatgctgtaa

SEQ ID NO: 1636 - DNA, 1443 bp, synthetic construct
  source 1..1443: mol_type = other DNA; note = VL12.3-(GS)5-E6AP nucleic acid
ggcagccaacctgtgctgacacagagccccagcgtgtccgccgctcctcggcagcgggtgaccatcagcgtgtccggctctaatagcaacatcggctccaacaccgtgaactggatccagcagctgcctggaagagcccccgagctgctgatgtacgacgacgacctgctcgccccaggcgtgtctgatagattcagcggctctagaagcggcaccagcgccagcctgaccatcagcggactgcagtctgaagatgaggccgactactacgccgctacatgggacgatagcctgaacggctgggtgttcggcggcggaacaaaggtgaccgtcctgagcggcggcagcggcagcggcagcggcagcggcagcaatccatatttgagactcaaagttagacgtgaccatatcatagatgatgcacttgtccggctagagatgatcgctatggaaaatcctgcagacttgaagaagcagttgtatgtggaatttgaaggagaacaaggagttgatgagggaggtgtttccaaagaattttttcagctggttgtggaggaaatcttcaatccagatattggtatgttcacatacgatgaatctacaaaattgttttggtttaatccatcttcttttgaaactgagggtcagtttactctgattggcatagtactgggtctggctatttacaataactgtatactggatgtacattttcccatggttgtctacaggaagctaatggggaaaaaaggaacttttcgtgacttgggagactctcacccagttctatatcagagtttaaaagatttattggagtatgaagggaatgtggaagatgacatgatgatcactttccagatatcacagacagatctttttggtaacccaatgatgtatgatctaaaggaaaatggtgataaaattccaattacaaatgaaaacaggaaggaatttgtcaatctttattctgactacattctcaataaatcagtagaaaaacagttcaaggcttttcggagaggttttcatatggtgaccaatgaatctcccttaaagtacttattcagaccagaagaaattgaattgcttatatgtggaagccggaatctagatttccaagcactagaagaaactacagaatatgacggtggctataccagggactctgttctgattagggagttctgggaaatcgttcattcatttacagatgaacagaaaagactcttcttgcagtttacaacgggcacagacagagcacctgtgggaggactaggaaaattaaagatgattatagccaaaaatggcccagacacagaaaggttacctacatctcatacttgctttaatgtgcttttacttccggaatactcaagcaaagaaaaacttaaagagagattgttgaaggccatcacgtatgccaaaggatttggcatgctgtaa

SEQ ID NO: 1637 - DNA, 1449 bp, synthetic construct
  source 1..1449: mol_type = other DNA; note = VL12.3-(GS)6-E6AP nucleic acid
ggcagccaacctgtgctgacacagagccccagcgtgtccgccgctcctcggcagcgggtgaccatcagcgtgtccggctctaatagcaacatcggctccaacaccgtgaactggatccagcagctgcctggaagagcccccgagctgctgatgtacgacgacgacctgctcgccccaggcgtgtctgatagattcagcggctctagaagcggcaccagcgccagcctgaccatcagcggactgcagtctgaagatgaggccgactactacgccgctacatgggacgatagcctgaacggctgggtgttcggcggcggaacaaaggtgaccgtcctgagcggcggcagcggcagcggcagcggcagcggcagcggcagcaatccatatttgagactcaaagttagacgtgaccatatcatagatgatgcacttgtccggctagagatgatcgctatggaaaatcctgcagacttgaagaagcagttgtatgtggaatttgaaggagaacaaggagttgatgagggaggtgtttccaaagaattttttcagctggttgtggaggaaatcttcaatccagatattggtatgttcacatacgatgaatctacaaaattgttttggtttaatccatcttcttttgaaactgagggtcagtttactctgattggcatagtactgggtctggctatttacaataactgtatactggatgtacattttcccatggttgtctacaggaagctaatggggaaaaaaggaacttttcgtgacttgggagactctcacccagttctatatcagagtttaaaagatttattggagtatgaagggaatgtggaagatgacatgatgatcactttccagatatcacagacagatctttttggtaacccaatgatgtatgatctaaaggaaaatggtgataaaattccaattacaaatgaaaacaggaaggaatttgtcaatctttattctgactacattctcaataaatcagtagaaaaacagttcaaggcttttcggagaggttttcatatggtgaccaatgaatctcccttaaagtacttattcagaccagaagaaattgaattgcttatatgtggaagccggaatctagatttccaagcactagaagaaactacagaatatgacggtggctataccagggactctgttctgattagggagttctgggaaatcgttcattcatttacagatgaacagaaaagactcttcttgcagtttacaacgggcacagacagagcacctgtgggaggactaggaaaattaaagatgattatagccaaaaatggcccagacacagaaaggttacctacatctcatacttgctttaatgtgcttttacttccggaatactcaagcaaagaaaaacttaaagagagattgttgaaggccatcacgtatgccaaaggatttggcatgctgtaa

SEQ ID NO: 1638 - DNA, 1467 bp, synthetic construct
  source 1..1467: mol_type = other DNA; note = HA-VL12.3-(GS)1-E6AP nucleic acid
atgtacccatacgatgttccagattacgctggcagcggcagcggcagcggcagccaacctgtgctgacacagagccccagcgtgtccgccgctcctcggcagcgggtgaccatcagcgtgtccggctctaatagcaacatcggctccaacaccgtgaactggatccagcagctgcctggaagagcccccgagctgctgatgtacgacgacgacctgctcgccccaggcgtgtctgatagattcagcggctctagaagcggcaccagcgccagcctgaccatcagcggactgcagtctgaagatgaggccgactactacgccgctacatgggacgatagcctgaacggctgggtgttcggcggcggaacaaaggtgaccgtcctgagcggcggcagcaatccatatttgagactcaaagttagacgtgaccatatcatagatgatgcacttgtccggctagagatgatcgctatggaaaatcctgcagacttgaagaagcagttgtatgtggaatttgaaggagaacaaggagttgatgagggaggtgtttccaaagaattttttcagctggttgtggaggaaatcttcaatccagatattggtatgttcacatacgatgaatctacaaaattgttttggtttaatccatcttcttttgaaactgagggtcagtttactctgattggcatagtactgggtctggctatttacaataactgtatactggatgtacattttcccatggttgtctacaggaagctaatggggaaaaaaggaacttttcgtgacttgggagactctcacccagttctatatcagagtttaaaagatttattggagtatgaagggaatgtggaagatgacatgatgatcactttccagatatcacagacagatctttttggtaacccaatgatgtatgatctaaaggaaaatggtgataaaattccaattacaaatgaaaacaggaaggaatttgtcaatctttattctgactacattctcaataaatcagtagaaaaacagttcaaggcttttcggagaggttttcatatggtgaccaatgaatctcccttaaagtacttattcagaccagaagaaattgaattgcttatatgtggaagccggaatctagatttccaagcactagaagaaactacagaatatgacggtggctataccagggactctgttctgattagggagttctgggaaatcgttcattcatttacagatgaacagaaaagactcttcttgcagtttacaacgggcacagacagagcacctgtgggaggactaggaaaattaaagatgattatagccaaaaatggcccagacacagaaaggttacctacatctcatacttgctttaatgtgcttttacttccggaatactcaagcaaagaaaaacttaaagagagattgttgaaggccatcacgtatgccaaaggatttggcatgctgtaa

SEQ ID NO: 1639 - DNA, 1473 bp, synthetic construct
  source 1..1473: mol_type = other DNA; note = HA-VL12.3-(GS)2-E6AP nucleic acid
atgtacccatacgatgttccagattacgctggcagcggcagcggcagcggcagccaacctgtgctgacacagagccccagcgtgtccgccgctcctcggcagcgggtgaccatcagcgtgtccggctctaatagcaacatcggctccaacaccgtgaactggatccagcagctgcctggaagagcccccgagctgctgatgtacgacgacgacctgctcgccccaggcgtgtctgatagattcagcggctctagaagcggcaccagcgccagcctgaccatcagcggactgcagtctgaagatgaggccgactactacgccgctacatgggacgatagcctgaacggctgggtgttcggcggcggaacaaaggtgaccgtcctgagcggcggcagcggcagcaatccatatttgagactcaaagttagacgtgaccatatcatagatgatgcacttgtccggctagagatgatcgctatggaaaatcctgcagacttgaagaagcagttgtatgtggaatttgaaggagaacaaggagttgatgagggaggtgtttccaaagaattttttcagctggttgtggaggaaatcttcaatccagatattggtatgttcacatacgatgaatctacaaaattgttttggtttaatccatcttcttttgaaactgagggtcagtttactctgattggcatagtactgggtctggctatttacaataactgtatactggatgtacattttcccatggttgtctacaggaagctaatggggaaaaaaggaacttttcgtgacttgggagactctcacccagttctatatcagagtttaaaagatttattggagtatgaagggaatgtggaagatgacatgatgatcactttccagatatcacagacagatctttttggtaacccaatgatgtatgatctaaaggaaaatggtgataaaattccaattacaaatgaaaacaggaaggaatttgtcaatctttattctgactacattctcaataaatcagtagaaaaacagttcaaggcttttcggagaggttttcatatggtgaccaatgaatctcccttaaagtacttattcagaccagaagaaattgaattgcttatatgtggaagccggaatctagatttccaagcactagaagaaactacagaatatgacggtggctataccagggactctgttctgattagggagttctgggaaatcgttcattcatttacagatgaacagaaaagactcttcttgcagtttacaacgggcacagacagagcacctgtgggaggactaggaaaattaaagatgattatagccaaaaatggcccagacacagaaaggttacctacatctcatacttgctttaatgtgcttttacttccggaatactcaagcaaagaaaaacttaaagagagattgttgaaggccatcacgtatgccaaaggatttggcatgctgtaa

SEQ ID NO: 1640 - DNA, 1479 bp, synthetic construct
  source 1..1479: mol_type = other DNA; note = HA-VL12.3-(GS)3-E6AP nucleic acid
atgtacccatacgatgttccagattacgctggcagcggcagcggcagcggcagccaacctgtgctgacacagagccccagcgtgtccgccgctcctcggcagcgggtgaccatcagcgtgtccggctctaatagcaacatcggctccaacaccgtgaactggatccagcagctgcctggaagagcccccgagctgctgatgtacgacgacgacctgctcgccccaggcgtgtctgatagattcagcggctctagaagcggcaccagcgccagcctgaccatcagcggactgcagtctgaagatgaggccgactactacgccgctacatgggacgatagcctgaacggctgggtgttcggcggcggaacaaaggtgaccgtcctgagcggcggcagcggcagcggcagcaatccatatttgagactcaaagttagacgtgaccatatcatagatgatgcacttgtccggctagagatgatcgctatggaaaatcctgcagacttgaagaagcagttgtatgtggaatttgaaggagaacaaggagttgatgagggaggtgtttccaaagaattttttcagctggttgtggaggaaatcttcaatccagatattggtatgttcacatacgatgaatctacaaaattgttttggtttaatccatcttcttttgaaactgagggtcagtttactctgattggcatagtactgggtctggctatttacaataactgtatactggatgtacattttcccatggttgtctacaggaagctaatggggaaaaaaggaacttttcgtgacttgggagactctcacccagttctatatcagagtttaaaagatttattggagtatgaagggaatgtggaagatgacatgatgatcactttccagatatcacagacagatctttttggtaacccaatgatgtatgatctaaaggaaaatggtgataaaattccaattacaaatgaaaacaggaaggaatttgtcaatctttattctgactacattctcaataaatcagtagaaaaacagttcaaggcttttcggagaggttttcatatggtgaccaatgaatctcccttaaagtacttattcagaccagaagaaattgaattgcttatatgtggaagccggaatctagatttccaagcactagaagaaactacagaatatgacggtggctataccagggactctgttctgattagggagttctgggaaatcgttcattcatttacagatgaacagaaaagactcttcttgcagtttacaacgggcacagacagagcacctgtgggaggactaggaaaattaaagatgattatagccaaaaatggcccagacacagaaaggttacctacatctcatacttgctttaatgtgcttttacttccggaatactcaagcaaagaaaaacttaaagagagattgttgaaggccatcacgtatgccaaaggatttggcatgctgtaa

SEQ ID NO: 1641 - DNA, 1485 bp, synthetic construct
  source 1..1485: mol_type = other DNA; note = HA-VL12.3-(GS)4-E6AP nucleic acid
atgtacccatacgatgttccagattacgctggcagcggcagcggcagcggcagccaacctgtgctgacacagagccccagcgtgtccgccgctcctcggcagcgggtgaccatcagcgtgtccggctctaatagcaacatcggctccaacaccgtgaactggatccagcagctgcctggaagagcccccgagctgctgatgtacgacgacgacctgctcgccccaggcgtgtctgatagattcagcggctctagaagcggcaccagcgccagcctgaccatcagcggactgcagtctgaagatgaggccgactactacgccgctacatgggacgatagcctgaacggctgggtgttcggcggcggaacaaaggtgaccgtcctgagcggcggcagcggcagcggcagcggcagcaatccatatttgagactcaaagttagacgtgaccatatcatagatgatgcacttgtccggctagagatgatcgctatggaaaatcctgcagacttgaagaagcagttgtatgtggaatttgaaggagaacaaggagttgatgagggaggtgtttccaaagaattttttcagctggttgtggaggaaatcttcaatccagatattggtatgttcacatacgatgaatctacaaaattgttttggtttaatccatcttcttttgaaactgagggtcagtttactctgattggcatagtactgggtctggctatttacaataactgtatactggatgtacattttcccatggttgtctacaggaagctaatggggaaaaaaggaacttttcgtgacttgggagactctcacccagttctatatcagagtttaaaagatttattggagtatgaagggaatgtggaagatgacatgatgatcactttccagatatcacagacagatctttttggtaacccaatgatgtatgatctaaaggaaaatggtgataaaattccaattacaaatgaaaacaggaaggaatttgtcaatctttattctgactacattctcaataaatcagtagaaaaacagttcaaggcttttcggagaggttttcatatggtgaccaatgaatctcccttaaagtacttattcagaccagaagaaattgaattgcttatatgtggaagccggaatctagatttccaagcactagaagaaactacagaatatgacggtggctataccagggactctgttctgattagggagttctgggaaatcgttcattcatttacagatgaacagaaaagactcttcttgcagtttacaacgggcacagacagagcacctgtgggaggactaggaaaattaaagatgattatagccaaaaatggcccagacacagaaaggttacctacatctcatacttgctttaatgtgcttttacttccggaatactcaagcaaagaaaaacttaaagagagattgttgaaggccatcacgtatgccaaaggatttggcatgctgtaa

SEQ ID NO: 1642 - DNA, 1491 bp, synthetic construct
  source 1..1491: mol_type = other DNA; note = HA-VL12.3-(GS)5-E6AP nucleic acid
atgtacccatacgatgttccagattacgctggcagcggcagcggcagcggcagccaacctgtgctgacacagagccccagcgtgtccgccgctcctcggcagcgggtgaccatcagcgtgtccggctctaatagcaacatcggctccaacaccgtgaactggatccagcagctgcctggaagagcccccgagctgctgatgtacgacgacgacctgctcgccccaggcgtgtctgatagattcagcggctctagaagcggcaccagcgccagcctgaccatcagcggactgcagtctgaagatgaggccgactactacgccgctacatgggacgatagcctgaacggctgggtgttcggcggcggaacaaaggtgaccgtcctgagcggcggcagcggcagcggcagcggcagcggcagcaatccatatttgagactcaaagttagacgtgaccatatcatagatgatgcacttgtccggctagagatgatcgctatggaaaatcctgcagacttgaagaagcagttgtatgtggaatttgaaggagaacaaggagttgatgagggaggtgtttccaaagaattttttcagctggttgtggaggaaatcttcaatccagatattggtatgttcacatacgatgaatctacaaaattgttttggtttaatccatcttcttttgaaactgagggtcagtttactctgattggcatagtactgggtctggctatttacaataactgtatactggatgtacattttcccatggttgtctacaggaagctaatggggaaaaaaggaacttttcgtgacttgggagactctcacccagttctatatcagagtttaaaagatttattggagtatgaagggaatgtggaagatgacatgatgatcactttccagatatcacagacagatctttttggtaacccaatgatgtatgatctaaaggaaaatggtgataaaattccaattacaaatgaaaacaggaaggaatttgtcaatctttattctgactacattctcaataaatcagtagaaaaacagttcaaggcttttcggagaggttttcatatggtgaccaatgaatctcccttaaagtacttattcagaccagaagaaattgaattgcttatatgtggaagccggaatctagatttccaagcactagaagaaactacagaatatgacggtggctataccagggactctgttctgattagggagttctgggaaatcgttcattcatttacagatgaacagaaaagactcttcttgcagtttacaacgggcacagacagagcacctgtgggaggactaggaaaattaaagatgattatagccaaaaatggcccagacacagaaaggttacctacatctcatacttgctttaatgtgcttttacttccggaatactcaagcaaagaaaaacttaaagagagattgttgaaggccatcacgtatgccaaaggatttggcatgctgtaa

SEQ ID NO: 1643 - DNA, 1497 bp, synthetic construct
  source 1..1497: mol_type = other DNA; note = HA-VL12.3-(GS)6-E6AP nucleic acid
atgtacccatacgatgttccagattacgctggcagcggcagcggcagcggcagccaacctgtgctgacacagagccccagcgtgtccgccgctcctcggcagcgggtgaccatcagcgtgtccggctctaatagcaacatcggctccaacaccgtgaactggatccagcagctgcctggaagagcccccgagctgctgatgtacgacgacgacctgctcgccccaggcgtgtctgatagattcagcggctctagaagcggcaccagcgccagcctgaccatcagcggactgcagtctgaagatgaggccgactactacgccgctacatgggacgatagcctgaacggctgggtgttcggcggcggaacaaaggtgaccgtcctgagcggcggcagcggcagcggcagcggcagcggcagcggcagcaatccatatttgagactcaaagttagacgtgaccatatcatagatgatgcacttgtccggctagagatgatcgctatggaaaatcctgcagacttgaagaagcagttgtatgtggaatttgaaggagaacaaggagttgatgagggaggtgtttccaaagaattttttcagctggttgtggaggaaatcttcaatccagatattggtatgttcacatacgatgaatctacaaaattgttttggtttaatccatcttcttttgaaactgagggtcagtttactctgattggcatagtactgggtctggctatttacaataactgtatactggatgtacattttcccatggttgtctacaggaagctaatggggaaaaaaggaacttttcgtgacttgggagactctcacccagttctatatcagagtttaaaagatttattggagtatgaagggaatgtggaagatgacatgatgatcactttccagatatcacagacagatctttttggtaacccaatgatgtatgatctaaaggaaaatggtgataaaattccaattacaaatgaaaacaggaaggaatttgtcaatctttattctgactacattctcaataaatcagtagaaaaacagttcaaggcttttcggagaggttttcatatggtgaccaatgaatctcccttaaagtacttattcagaccagaagaaattgaattgcttatatgtggaagccggaatctagatttccaagcactagaagaaactacagaatatgacggtggctataccagggactctgttctgattagggagttctgggaaatcgttcattcatttacagatgaacagaaaagactcttcttgcagtttacaacgggcacagacagagcacctgtgggaggactaggaaaattaaagatgattatagccaaaaatggcccagacacagaaaggttacctacatctcatacttgctttaatgtgcttttacttccggaatactcaagcaaagaaaaacttaaagagagattgttgaaggccatcacgtatgccaaaggatttggcatgctgtaa

SEQ ID NO: 1644 - DNA, 1212 bp, synthetic construct
  source 1..1212: mol_type = other DNA; note = FBXW7b-(GS)1-VL12.3 nucleic acid
tgtgtcccgagaagcggtttgatactgagctgcatttgcctttactgtggagttttgttgccggttctgctccctaatcttccttttctgacgtgcctgagcatgtccacattagaatctgtgacatacctacctgaaaaaggtttatattgtcagagactgccaagcagccggacacacgggggcacagaatcactgaaggggaaaaatacagaaaatatgggtttctacggcacattaaaaatgattttttacaaaatgaaaagaaagttggaccatggttctgaggtccgctctttttctttgggaaagaaaccatgcaaagtctcagaatatacaagtaccactgggcttgtaccatgttcagcaacaccaacaacttttggggacctcagagcagccaatggccaagggcaacaacgacgccgaattacatctgtccagccacctacaggcctccaggaatggctaaaaatgtttcagagctggagtggaccagagaaattgcttgctttagatgaactcattgatagttgtgaaccaacacaagtaaaacatatgatgcaagtgatagaaccccagtttcaacgagacttcatttcattgctccctaaagagttggcactctatgtgctttcattcctggaacccaaagacctgctacaagcagctcagacatgtcgctactggagaattttggctgaagacaaccttctctggagagagaaatgcaaagaagaggggattgatgaaccattgcacatcaagagaagaaaagtaataaaaccaggtttcatacacagtccatggaaaagtgcatacatcagacagcacagaattgatactaactcgaggcgaggaggcagcggcagccaacctgtgctgacacagagccccagcgtgtccgccgctcctcggcagcgggtgaccatcagcgtgtccggctctaatagcaacatcggctccaacaccgtgaactggatccagcagctgcctggaagagcccccgagctgctgatgtacgacgacgacctgctcgccccaggcgtgtctgatagattcagcggctctagaagcggcaccagcgccagcctgaccatcagcggactgcagtctgaagatgaggccgactactacgccgctacatgggacgatagcctgaacggctgggtgttcggcggcggaacaaaggtgaccgtcctgagcggctaa

SEQ ID NO: 1645 - DNA, 1218 bp, synthetic construct
  source 1..1218: mol_type = other DNA; note = FBXW7b-(GS)2-VL12.3 nucleic acid
tgtgtcccgagaagcggtttgatactgagctgcatttgcctttactgtggagttttgttgccggttctgctccctaatcttccttttctgacgtgcctgagcatgtccacattagaatctgtgacatacctacctgaaaaaggtttatattgtcagagactgccaagcagccggacacacgggggcacagaatcactgaaggggaaaaatacagaaaatatgggtttctacggcacattaaaaatgattttttacaaaatgaaaagaaagttggaccatggttctgaggtccgctctttttctttgggaaagaaaccatgcaaagtctcagaatatacaagtaccactgggcttgtaccatgttcagcaacaccaacaacttttggggacctcagagcagccaatggccaagggcaacaacgacgccgaattacatctgtccagccacctacaggcctccaggaatggctaaaaatgtttcagagctggagtggaccagagaaattgcttgctttagatgaactcattgatagttgtgaaccaacacaagtaaaacatatgatgcaagtgatagaaccccagtttcaacgagacttcatttcattgctccctaaagagttggcactctatgtgctttcattcctggaacccaaagacctgctacaagcagctcagacatgtcgctactggagaattttggctgaagacaaccttctctggagagagaaatgcaaagaagaggggattgatgaaccattgcacatcaagagaagaaaagtaataaaaccaggtttcatacacagtccatggaaaagtgcatacatcagacagcacagaattgatactaactcgaggcgaggaggcagcggcagcggcagccaacctgtgctgacacagagccccagcgtgtccgccgctcctcggcagcgggtgaccatcagcgtgtccggctctaatagcaacatcggctccaacaccgtgaactggatccagcagctgcctggaagagcccccgagctgctgatgtacgacgacgacctgctcgccccaggcgtgtctgatagattcagcggctctagaagcggcaccagcgccagcctgaccatcagcggactgcagtctgaagatgaggccgactactacgccgctacatgggacgatagcctgaacggctgggtgttcggcggcggaacaaaggtgaccgtcctgagcggctaa

SEQ ID NO: 1646 - DNA, 1224 bp, synthetic construct
  source 1..1224: mol_type = other DNA; note = FBXW7b-(GS)3-VL12.3 nucleic acid
tgtgtcccgagaagcggtttgatactgagctgcatttgcctttactgtggagttttgttgccggttctgctccctaatcttccttttctgacgtgcctgagcatgtccacattagaatctgtgacatacctacctgaaaaaggtttatattgtcagagactgccaagcagccggacacacgggggcacagaatcactgaaggggaaaaatacagaaaatatgggtttctacggcacattaaaaatgattttttacaaaatgaaaagaaagttggaccatggttctgaggtccgctctttttctttgggaaagaaaccatgcaaagtctcagaatatacaagtaccactgggcttgtaccatgttcagcaacaccaacaacttttggggacctcagagcagccaatggccaagggcaacaacgacgccgaattacatctgtccagccacctacaggcctccaggaatggctaaaaatgtttcagagctggagtggaccagagaaattgcttgctttagatgaactcattgatagttgtgaaccaacacaagtaaaacatatgatgcaagtgatagaaccccagtttcaacgagacttcatttcattgctccctaaagagttggcactctatgtgctttcattcctggaacccaaagacctgctacaagcagctcagacatgtcgctactggagaattttggctgaagacaaccttctctggagagagaaatgcaaagaagaggggattgatgaaccattgcacatcaagagaagaaaagtaataaaaccaggtttcatacacagtccatggaaaagtgcatacatcagacagcacagaattgatactaactcgaggcgaggaggcagcggcagcggcagcggcagccaacctgtgctgacacagagccccagcgtgtccgccgctcctcggcagcgggtgaccatcagcgtgtccggctctaatagcaacatcggctccaacaccgtgaactggatccagcagctgcctggaagagcccccgagctgctgatgtacgacgacgacctgctcgccccaggcgtgtctgatagattcagcggctctagaagcggcaccagcgccagcctgaccatcagcggactgcagtctgaagatgaggccgactactacgccgctacatgggacgatagcctgaacggctgggtgttcggcggcggaacaaaggtgaccgtcctgagcggctaa

SEQ ID NO: 1647 - DNA, 1230 bp, synthetic construct
  source 1..1230: mol_type = other DNA; note = FBXW7b-(GS)4-VL12.3 nucleic acid
tgtgtcccgagaagcggtttgatactgagctgcatttgcctttactgtggagttttgttgccggttctgctccctaatcttccttttctgacgtgcctgagcatgtccacattagaatctgtgacatacctacctgaaaaaggtttatattgtcagagactgccaagcagccggacacacgggggcacagaatcactgaaggggaaaaatacagaaaatatgggtttctacggcacattaaaaatgattttttacaaaatgaaaagaaagttggaccatggttctgaggtccgctctttttctttgggaaagaaaccatgcaaagtctcagaatatacaagtaccactgggcttgtaccatgttcagcaacaccaacaacttttggggacctcagagcagccaatggccaagggcaacaacgacgccgaattacatctgtccagccacctacaggcctccaggaatggctaaaaatgtttcagagctggagtggaccagagaaattgcttgctttagatgaactcattgatagttgtgaaccaacacaagtaaaacatatgatgcaagtgatagaaccccagtttcaacgagacttcatttcattgctccctaaagagttggcactctatgtgctttcattcctggaacccaaagacctgctacaagcagctcagacatgtcgctactggagaattttggctgaagacaaccttctctggagagagaaatgcaaagaagaggggattgatgaaccattgcacatcaagagaagaaaagtaataaaaccaggtttcatacacagtccatggaaaagtgcatacatcagacagcacagaattgatactaactcgaggcgaggaggcagcggcagcggcagcggcagcggcagccaacctgtgctgacacagagccccagcgtgtccgccgctcctcggcagcgggtgaccatcagcgtgtccggctctaatagcaacatcggctccaacaccgtgaactggatccagcagctgcctggaagagcccccgagctgctgatgtacgacgacgacctgctcgccccaggcgtgtctgatagattcagcggctctagaagcggcaccagcgccagcctgaccatcagcggactgcagtctgaagatgaggccgactactacgccgctacatgggacgatagcctgaacggctgggtgttcggcggcggaacaaaggtgaccgtcctgagcggctaa

SEQ ID NO: 1648 - DNA, 1236 bp, synthetic construct
  source 1..1236: mol_type = other DNA; note = FBXW7b-(GS)5-VL12.3 nucleic acid
tgtgtcccgagaagcggtttgatactgagctgcatttgcctttactgtggagttttgttgccggttctgctccctaatcttccttttctgacgtgcctgagcatgtccacattagaatctgtgacatacctacctgaaaaaggtttatattgtcagagactgccaagcagccggacacacgggggcacagaatcactgaaggggaaaaatacagaaaatatgggtttctacggcacattaaaaatgattttttacaaaatgaaaagaaagttggaccatggttctgaggtccgctctttttctttgggaaagaaaccatgcaaagtctcagaatatacaagtaccactgggcttgtaccatgttcagcaacaccaacaacttttggggacctcagagcagccaatggccaagggcaacaacgacgccgaattacatctgtccagccacctacaggcctccaggaatggctaaaaatgtttcagagctggagtggaccagagaaattgcttgctttagatgaactcattgatagttgtgaaccaacacaagtaaaacatatgatgcaagtgatagaaccccagtttcaacgagacttcatttcattgctccctaaagagttggcactctatgtgctttcattcctggaacccaaagacctgctacaagcagctcagacatgtcgctactggagaattttggctgaagacaaccttctctggagagagaaatgcaaagaagaggggattgatgaaccattgcacatcaagagaagaaaagtaataaaaccaggtttcatacacagtccatggaaaagtgcatacatcagacagcacagaattgatactaactcgaggcgaggaggcagcggcagcggcagcggcagcggcagcggcagccaacctgtgctgacacagagccccagcgtgtccgccgctcctcggcagcgggtgaccatcagcgtgtccggctctaatagcaacatcggctccaacaccgtgaactggatccagcagctgcctggaagagcccccgagctgctgatgtacgacgacgacctgctcgccccaggcgtgtctgatagattcagcggctctagaagcggcaccagcgccagcctgaccatcagcggactgcagtctgaagatgaggccgactactacgccgctacatgggacgatagcctgaacggctgggtgttcggcggcggaacaaaggtgaccgtcctgagcggctaa

SEQ ID NO: 1649 - DNA, 1242 bp, synthetic construct
  source 1..1242: mol_type = other DNA; note = FBXW7b-(GS)6-VL12.3 nucleic acid
tgtgtcccgagaagcggtttgatactgagctgcatttgcctttactgtggagttttgttgccggttctgctccctaatcttccttttctgacgtgcctgagcatgtccacattagaatctgtgacatacctacctgaaaaaggtttatattgtcagagactgccaagcagccggacacacgggggcacagaatcactgaaggggaaaaatacagaaaatatgggtttctacggcacattaaaaatgattttttacaaaatgaaaagaaagttggaccatggttctgaggtccgctctttttctttgggaaagaaaccatgcaaagtctcagaatatacaagtaccactgggcttgtaccatgttcagcaacaccaacaacttttggggacctcagagcagccaatggccaagggcaacaacgacgccgaattacatctgtccagccacctacaggcctccaggaatggctaaaaatgtttcagagctggagtggaccagagaaattgcttgctttagatgaactcattgatagttgtgaaccaacacaagtaaaacatatgatgcaagtgatagaaccccagtttcaacgagacttcatttcattgctccctaaagagttggcactctatgtgctttcattcctggaacccaaagacctgctacaagcagctcagacatgtcgctactggagaattttggctgaagacaaccttctctggagagagaaatgcaaagaagaggggattgatgaaccattgcacatcaagagaagaaaagtaataaaaccaggtttcatacacagtccatggaaaagtgcatacatcagacagcacagaattgatactaactcgaggcgaggaggcagcggcagcggcagcggcagcggcagcggcagcggcagccaacctgtgctgacacagagccccagcgtgtccgccgctcctcggcagcgggtgaccatcagcgtgtccggctctaatagcaacatcggctccaacaccgtgaactggatccagcagctgcctggaagagcccccgagctgctgatgtacgacgacgacctgctcgccccaggcgtgtctgatagattcagcggctctagaagcggcaccagcgccagcctgaccatcagcggactgcagtctgaagatgaggccgactactacgccgctacatgggacgatagcctgaacggctgggtgttcggcggcggaacaaaggtgaccgtcctgagcggctaa

SEQ ID NO: 1650 - DNA, 1242 bp, synthetic construct
  source 1..1242: mol_type = other DNA; note = HA-FBXW7b-(GS)1-VL12.3 nucleic acid
atgtacccatacgatgttccagattacgcttgtgtcccgagaagcggtttgatactgagctgcatttgcctttactgtggagttttgttgccggttctgctccctaatcttccttttctgacgtgcctgagcatgtccacattagaatctgtgacatacctacctgaaaaaggtttatattgtcagagactgccaagcagccggacacacgggggcacagaatcactgaaggggaaaaatacagaaaatatgggtttctacggcacattaaaaatgattttttacaaaatgaaaagaaagttggaccatggttctgaggtccgctctttttctttgggaaagaaaccatgcaaagtctcagaatatacaagtaccactgggcttgtaccatgttcagcaacaccaacaacttttggggacctcagagcagccaatggccaagggcaacaacgacgccgaattacatctgtccagccacctacaggcctccaggaatggctaaaaatgtttcagagctggagtggaccagagaaattgcttgctttagatgaactcattgatagttgtgaaccaacacaagtaaaacatatgatgcaagtgatagaaccccagtttcaacgagacttcatttcattgctccctaaagagttggcactctatgtgctttcattcctggaacccaaagacctgctacaagcagctcagacatgtcgctactggagaattttggctgaagacaaccttctctggagagagaaatgcaaagaagaggggattgatgaaccattgcacatcaagagaagaaaagtaataaaaccaggtttcatacacagtccatggaaaagtgcatacatcagacagcacagaattgatactaactcgaggcgaggaggcagcggcagccaacctgtgctgacacagagccccagcgtgtccgccgctcctcggcagcgggtgaccatcagcgtgtccggctctaatagcaacatcggctccaacaccgtgaactggatccagcagctgcctggaagagcccccgagctgctgatgtacgacgacgacctgctcgccccaggcgtgtctgatagattcagcggctctagaagcggcaccagcgccagcctgaccatcagcggactgcagtctgaagatgaggccgactactacgccgctacatgggacgatagcctgaacggctgggtgttcggcggcggaacaaaggtgaccgtcctgagcggctaa

SEQ ID NO: 1651 - DNA, 1248 bp, synthetic construct
  source 1..1248: mol_type = other DNA; note = HA-FBXW7b-(GS)2-VL12.3 nucleic acid
atgtacccatacgatgttccagattacgcttgtgtcccgagaagcggtttgatactgagctgcatttgcctttactgtggagttttgttgccggttctgctccctaatcttccttttctgacgtgcctgagcatgtccacattagaatctgtgacatacctacctgaaaaaggtttatattgtcagagactgccaagcagccggacacacgggggcacagaatcactgaaggggaaaaatacagaaaatatgggtttctacggcacattaaaaatgattttttacaaaatgaaaagaaagttggaccatggttctgaggtccgctctttttctttgggaaagaaaccatgcaaagtctcagaatatacaagtaccactgggcttgtaccatgttcagcaacaccaacaacttttggggacctcagagcagccaatggccaagggcaacaacgacgccgaattacatctgtccagccacctacaggcctccaggaatggctaaaaatgtttcagagctggagtggaccagagaaattgcttgctttagatgaactcattgatagttgtgaaccaacacaagtaaaacatatgatgcaagtgatagaaccccagtttcaacgagacttcatttcattgctccctaaagagttggcactctatgtgctttcattcctggaacccaaagacctgctacaagcagctcagacatgtcgctactggagaattttggctgaagacaaccttctctggagagagaaatgcaaagaagaggggattgatgaaccattgcacatcaagagaagaaaagtaataaaaccaggtttcatacacagtccatggaaaagtgcatacatcagacagcacagaattgatactaactcgaggcgaggaggcagcggcagcggcagccaacctgtgctgacacagagccccagcgtgtccgccgctcctcggcagcgggtgaccatcagcgtgtccggctctaatagcaacatcggctccaacaccgtgaactggatccagcagctgcctggaagagcccccgagctgctgatgtacgacgacgacctgctcgccccaggcgtgtctgatagattcagcggctctagaagcggcaccagcgccagcctgaccatcagcggactgcagtctgaagatgaggccgactactacgccgctacatgggacgatagcctgaacggctgggtgttcggcggcggaacaaaggtgaccgtcctgagcggctaa

SEQ ID NO: 1652 - DNA, 1254 bp, synthetic construct
  source 1..1254: mol_type = other DNA; note = HA-FBXW7b-(GS)3-VL12.3 nucleic acid
atgtacccatacgatgttccagattacgcttgtgtcccgagaagcggtttgatactgagctgcatttgcctttactgtggagttttgttgccggttctgctccctaatcttccttttctgacgtgcctgagcatgtccacattagaatctgtgacatacctacctgaaaaaggtttatattgtcagagactgccaagcagccggacacacgggggcacagaatcactgaaggggaaaaatacagaaaatatgggtttctacggcacattaaaaatgattttttacaaaatgaaaagaaagttggaccatggttctgaggtccgctctttttctttgggaaagaaaccatgcaaagtctcagaatatacaagtaccactgggcttgtaccatgttcagcaacaccaacaacttttggggacctcagagcagccaatggccaagggcaacaacgacgccgaattacatctgtccagccacctacaggcctccaggaatggctaaaaatgtttcagagctggagtggaccagagaaattgcttgctttagatgaactcattgatagttgtgaaccaacacaagtaaaacatatgatgcaagtgatagaaccccagtttcaacgagacttcatttcattgctccctaaagagttggcactctatgtgctttcattcctggaacccaaagacctgctacaagcagctcagacatgtcgctactggagaattttggctgaagacaaccttctctggagagagaaatgcaaagaagaggggattgatgaaccattgcacatcaagagaagaaaagtaataaaaccaggtttcatacacagtccatggaaaagtgcatacatcagacagcacagaattgatactaactcgaggcgaggaggcagcggcagcggcagcggcagccaacctgtgctgacacagagccccagcgtgtccgccgctcctcggcagcgggtgaccatcagcgtgtccggctctaatagcaacatcggctccaacaccgtgaactggatccagcagctgcctggaagagcccccgagctgctgatgtacgacgacgacctgctcgccccaggcgtgtctgatagattcagcggctctagaagcggcaccagcgccagcctgaccatcagcggactgcagtctgaagatgaggccgactactacgccgctacatgggacgatagcctgaacggctgggtgttcggcggcggaacaaaggtgaccgtcctgagcggctaa

SEQ ID NO: 1653 - DNA, 1260 bp, synthetic construct
  source 1..1260: mol_type = other DNA; note = HA-FBXW7b-(GS)4-VL12.3 nucleic acid
atgtacccatacgatgttccagattacgcttgtgtcccgagaagcggtttgatactgagctgcatttgcctttactgtggagttttgttgccggttctgctccctaatcttccttttctgacgtgcctgagcatgtccacattagaatctgtgacatacctacctgaaaaaggtttatattgtcagagactgccaagcagccggacacacgggggcacagaatcactgaaggggaaaaatacagaaaatatgggtttctacggcacattaaaaatgattttttacaaaatgaaaagaaagttggaccatggttctgaggtccgctctttttctttgggaaagaaaccatgcaaagtctcagaatatacaagtaccactgggcttgtaccatgttcagcaacaccaacaacttttggggacctcagagcagccaatggccaagggcaacaacgacgccgaattacatctgtccagccacctacaggcctccaggaatggctaaaaatgtttcagagctggagtggaccagagaaattgcttgctttagatgaactcattgatagttgtgaaccaacacaagtaaaacatatgatgcaagtgatagaaccccagtttcaacgagacttcatttcattgctccctaaagagttggcactctatgtgctttcattcctggaacccaaagacctgctacaagcagctcagacatgtcgctactggagaattttggctgaagacaaccttctctggagagagaaatgcaaagaagaggggattgatgaaccattgcacatcaagagaagaaaagtaataaaaccaggtttcatacacagtccatggaaaagtgcatacatcagacagcacagaattgatactaactcgaggcgaggaggcagcggcagcggcagcggcagcggcagccaacctgtgctgacacagagccccagcgtgtccgccgctcctcggcagcgggtgaccatcagcgtgtccggctctaatagcaacatcggctccaacaccgtgaactggatccagcagctgcctggaagagcccccgagctgctgatgtacgacgacgacctgctcgccccaggcgtgtctgatagattcagcggctctagaagcggcaccagcgccagcctgaccatcagcggactgcagtctgaagatgaggccgactactacgccgctacatgggacgatagcctgaacggctgggtgttcggcggcggaacaaaggtgaccgtcctgagcggctaa

SEQ ID NO: 1654 - DNA, 1266 bp, synthetic construct
  source 1..1266: mol_type = other DNA; note = HA-FBXW7b-(GS)5-VL12.3 nucleic acid
atgtacccatacgatgttccagattacgcttgtgtcccgagaagcggtttgatactgagctgcatttgcctttactgtggagttttgttgccggttctgctccctaatcttccttttctgacgtgcctgagcatgtccacattagaatctgtgacatacctacctgaaaaaggtttatattgtcagagactgccaagcagccggacacacgggggcacagaatcactgaaggggaaaaatacagaaaatatgggtttctacggcacattaaaaatgattttttacaaaatgaaaagaaagttggaccatggttctgaggtccgctctttttctttgggaaagaaaccatgcaaagtctcagaatatacaagtaccactgggcttgtaccatgttcagcaacaccaacaacttttggggacctcagagcagccaatggccaagggcaacaacgacgccgaattacatctgtccagccacctacaggcctccaggaatggctaaaaatgtttcagagctggagtggaccagagaaattgcttgctttagatgaactcattgatagttgtgaaccaacacaagtaaaacatatgatgcaagtgatagaaccccagtttcaacgagacttcatttcattgctccctaaagagttggcactctatgtgctttcattcctggaacccaaagacctgctacaagcagctcagacatgtcgctactggagaattttggctgaagacaaccttctctggagagagaaatgcaaagaagaggggattgatgaaccattgcacatcaagagaagaaaagtaataaaaccaggtttcatacacagtccatggaaaagtgcatacatcagacagcacagaattgatactaactcgaggcgaggaggcagcggcagcggcagcggcagcggcagcggcagccaacctgtgctgacacagagccccagcgtgtccgccgctcctcggcagcgggtgaccatcagcgtgtccggctctaatagcaacatcggctccaacaccgtgaactggatccagcagctgcctggaagagcccccgagctgctgatgtacgacgacgacctgctcgccccaggcgtgtctgatagattcagcggctctagaagcggcaccagcgccagcctgaccatcagcggactgcagtctgaagatgaggccgactactacgccgctacatgggacgatagcctgaacggctgggtgttcggcggcggaacaaaggtgaccgtcctgagcggctaa

SEQ ID NO: 1655 - DNA, 1272 bp, synthetic construct
  source 1..1272: mol_type = other DNA; note = HA-FBXW7b-(GS)6-VL12.3 nucleic acid
atgtacccatacgatgttccagattacgcttgtgtcccgagaagcggtttgatactgagctgcatttgcctttactgtggagttttgttgccggttctgctccctaatcttccttttctgacgtgcctgagcatgtccacattagaatctgtgacatacctacctgaaaaaggtttatattgtcagagactgccaagcagccggacacacgggggcacagaatcactgaaggggaaaaatacagaaaatatgggtttctacggcacattaaaaatgattttttacaaaatgaaaagaaagttggaccatggttctgaggtccgctctttttctttgggaaagaaaccatgcaaagtctcagaatatacaagtaccactgggcttgtaccatgttcagcaacaccaacaacttttggggacctcagagcagccaatggccaagggcaacaacgacgccgaattacatctgtccagccacctacaggcctccaggaatggctaaaaatgtttcagagctggagtggaccagagaaattgcttgctttagatgaactcattgatagttgtgaaccaacacaagtaaaacatatgatgcaagtgatagaaccccagtttcaacgagacttcatttcattgctccctaaagagttggcactctatgtgctttcattcctggaacccaaagacctgctacaagcagctcagacatgtcgctactggagaattttggctgaagacaaccttctctggagagagaaatgcaaagaagaggggattgatgaaccattgcacatcaagagaagaaaagtaataaaaccaggtttcatacacagtccatggaaaagtgcatacatcagacagcacagaattgatactaactcgaggcgaggaggcagcggcagcggcagcggcagcggcagcggcagcggcagccaacctgtgctgacacagagccccagcgtgtccgccgctcctcggcagcgggtgaccatcagcgtgtccggctctaatagcaacatcggctccaacaccgtgaactggatccagcagctgcctggaagagcccccgagctgctgatgtacgacgacgacctgctcgccccaggcgtgtctgatagattcagcggctctagaagcggcaccagcgccagcctgaccatcagcggactgcagtctgaagatgaggccgactactacgccgctacatgggacgatagcctgaacggctgggtgttcggcggcggaacaaaggtgaccgtcctgagcggctaa

SEQ ID NO: 1656 - DNA, 1314 bp, synthetic construct
  source 1..1314: mol_type = other DNA; note = Keap1-(GS)1-VL12.3 nucleic acid
cagccagatcccaggcctagcggggctggggcctgctgccgattcctgcccctgcagtcacagtgccctgagggggcaggggacgcggtgatgtacgcctccactgagtgcaaggcggaggtgacgccctcccagcatggcaaccgcaccttcagctacaccctggaggatcataccaagcaggcctttggcatcatgaacgagctgcggctcagccagcagctgtgtgacgtcacactgcaggtcaagtaccaggatgcaccggccgcccagttcatggcccacaaggtggtgctggcctcatccagccctgtcttcaaggccatgttcaccaacgggctgcgggagcagggcatggaggtggtgtccattgagggtatccaccccaaggtcatggagcgcctcattgaattcgcctacacggcctccatctccatgggcgagaagtgtgtcctccacgtcatgaacggtgctgtcatgtaccagatcgacagcgttgtccgtgcctgcagtgacttcctggtgcagcagctggaccccagcaatgccatcggcatcgccaacttcgctgagcagattggctgtgtggagttgcaccagcgtgcccgggagtacatctacatgcattttggggaggtggccaagcaagaggagttcttcaacctgtcccactgccaactggtgaccctcatcagccgggacgacctgaacgtgcgctgcgagtccgaggtcttccacgcctgcatcaactgggtcaagtacgactgcgaacagcgacggttctacgtccaggcgctgctgcgggccgtgcgctgccactcgttgacgccgaacttcctgcagatgcagctgcagaagtgcgagatcctgcagtccgactcccgctgcaaggactacctggtcaagatcttcgaggagctcaccctgcacaagcccacgcaggtgatgccctgccgggcgcccggcagcggcagccaacctgtgctgacacagagccccagcgtgtccgccgctcctcggcagcgggtgaccatcagcgtgtccggctctaatagcaacatcggctccaacaccgtgaactggatccagcagctgcctggaagagcccccgagctgctgatgtacgacgacgacctgctcgccccaggcgtgtctgatagattcagcggctctagaagcggcaccagcgccagcctgaccatcagcggactgcagtctgaagatgaggccgactactacgccgctacatgggacgatagcctgaacggctgggtgttcggcggcggaacaaaggtgaccgtcctgagcggctaa

SEQ ID NO: 1657 - DNA, 1320 bp, synthetic construct
  source 1..1320: mol_type = other DNA; note = Keap1-(GS)2-VL12.3 nucleic acid
cagccagatcccaggcctagcggggctggggcctgctgccgattcctgcccctgcagtcacagtgccctgagggggcaggggacgcggtgatgtacgcctccactgagtgcaaggcggaggtgacgccctcccagcatggcaaccgcaccttcagctacaccctggaggatcataccaagcaggcctttggcatcatgaacgagctgcggctcagccagcagctgtgtgacgtcacactgcaggtcaagtaccaggatgcaccggccgcccagttcatggcccacaaggtggtgctggcctcatccagccctgtcttcaaggccatgttcaccaacgggctgcgggagcagggcatggaggtggtgtccattgagggtatccaccccaaggtcatggagcgcctcattgaattcgcctacacggcctccatctccatgggcgagaagtgtgtcctccacgtcatgaacggtgctgtcatgtaccagatcgacagcgttgtccgtgcctgcagtgacttcctggtgcagcagctggaccccagcaatgccatcggcatcgccaacttcgctgagcagattggctgtgtggagttgcaccagcgtgcccgggagtacatctacatgcattttggggaggtggccaagcaagaggagttcttcaacctgtcccactgccaactggtgaccctcatcagccgggacgacctgaacgtgcgctgcgagtccgaggtcttccacgcctgcatcaactgggtcaagtacgactgcgaacagcgacggttctacgtccaggcgctgctgcgggccgtgcgctgccactcgttgacgccgaacttcctgcagatgcagctgcagaagtgcgagatcctgcagtccgactcccgctgcaaggactacctggtcaagatcttcgaggagctcaccctgcacaagcccacgcaggtgatgccctgccgggcgcccggcagcggcagcggcagccaacctgtgctgacacagagccccagcgtgtccgccgctcctcggcagcgggtgaccatcagcgtgtccggctctaatagcaacatcggctccaacaccgtgaactggatccagcagctgcctggaagagcccccgagctgctgatgtacgacgacgacctgctcgccccaggcgtgtctgatagattcagcggctctagaagcggcaccagcgccagcctgaccatcagcggactgcagtctgaagatgaggccgactactacgccgctacatgggacgatagcctgaacggctgggtgttcggcggcggaacaaaggtgaccgtcctgagcggctaa

SEQ ID NO: 1658 - DNA, 1326 bp, synthetic construct
  source 1..1326: mol_type = other DNA; note = Keap1-(GS)3-VL12.3 nucleic acid
cagccagatcccaggcctagcggggctggggcctgctgccgattcctgcccctgcagtcacagtgccctgagggggcaggggacgcggtgatgtacgcctccactgagtgcaaggcggaggtgacgccctcccagcatggcaaccgcaccttcagctacaccctggaggatcataccaagcaggcctttggcatcatgaacgagctgcggctcagccagcagctgtgtgacgtcacactgcaggtcaagtaccaggatgcaccggccgcccagttcatggcccacaaggtggtgctggcctcatccagccctgtcttcaaggccatgttcaccaacgggctgcgggagcagggcatggaggtggtgtccattgagggtatccaccccaaggtcatggagcgcctcattgaattcgcctacacggcctccatctccatgggcgagaagtgtgtcctccacgtcatgaacggtgctgtcatgtaccagatcgacagcgttgtccgtgcctgcagtgacttcctggtgcagcagctggaccccagcaatgccatcggcatcgccaacttcgctgagcagattggctgtgtggagttgcaccagcgtgcccgggagtacatctacatgcattttggggaggtggccaagcaagaggagttcttcaacctgtcccactgccaactggtgaccctcatcagccgggacgacctgaacgtgcgctgcgagtccgaggtcttccacgcctgcatcaactgggtcaagtacgactgcgaacagcgacggttctacgtccaggcgctgctgcgggccgtgcgctgccactcgttgacgccgaacttcctgcagatgcagctgcagaagtgcgagatcctgcagtccgactcccgctgcaaggactacctggtcaagatcttcgaggagctcaccctgcacaagcccacgcaggtgatgccctgccgggcgcccggcagcggcagcggcagcggcagccaacctgtgctgacacagagccccagcgtgtccgccgctcctcggcagcgggtgaccatcagcgtgtccggctctaatagcaacatcggctccaacaccgtgaactggatccagcagctgcctggaagagcccccgagctgctgatgtacgacgacgacctgctcgccccaggcgtgtctgatagattcagcggctctagaagcggcaccagcgccagcctgaccatcagcggactgcagtctgaagatgaggccgactactacgccgctacatgggacgatagcctgaacggctgggtgttcggcggcggaacaaaggtgaccgtcctgagcggctaa

SEQ ID NO: 1659 - DNA, 1332 bp, synthetic construct
  source 1..1332: mol_type = other DNA; note = Keap1-(GS)4-VL12.3 nucleic acid
cagccagatcccaggcctagcggggctggggcctgctgccgattcctgcccctgcagtcacagtgccctgagggggcaggggacgcggtgatgtacgcctccactgagtgcaaggcggaggtgacgccctcccagcatggcaaccgcaccttcagctacaccctggaggatcataccaagcaggcctttggcatcatgaacgagctgcggctcagccagcagctgtgtgacgtcacactgcaggtcaagtaccaggatgcaccggccgcccagttcatggcccacaaggtggtgctggcctcatccagccctgtcttcaaggccatgttcaccaacgggctgcgggagcagggcatggaggtggtgtccattgagggtatccaccccaaggtcatggagcgcctcattgaattcgcctacacggcctccatctccatgggcgagaagtgtgtcctccacgtcatgaacggtgctgtcatgtaccagatcgacagcgttgtccgtgcctgcagtgacttcctggtgcagcagctggaccccagcaatgccatcggcatcgccaacttcgctgagcagattggctgtgtggagttgcaccagcgtgcccgggagtacatctacatgcattttggggaggtggccaagcaagaggagttcttcaacctgtcccactgccaactggtgaccctcatcagccgggacgacctgaacgtgcgctgcgagtccgaggtcttccacgcctgcatcaactgggtcaagtacgactgcgaacagcgacggttctacgtccaggcgctgctgcgggccgtgcgctgccactcgttgacgccgaacttcctgcagatgcagctgcagaagtgcgagatcctgcagtccgactcccgctgcaaggactacctggtcaagatcttcgaggagctcaccctgcacaagcccacgcaggtgatgccctgccgggcgcccggcagcggcagcggcagcggcagcggcagccaacctgtgctgacacagagccccagcgtgtccgccgctcctcggcagcgggtgaccatcagcgtgtccggctctaatagcaacatcggctccaacaccgtgaactggatccagcagctgcctggaagagcccccgagctgctgatgtacgacgacgacctgctcgccccaggcgtgtctgatagattcagcggctctagaagcggcaccagcgccagcctgaccatcagcggactgcagtctgaagatgaggccgactactacgccgctacatgggacgatagcctgaacggctgggtgttcggcggcggaacaaaggtgaccgtcctgagcggctaa

SEQ ID NO: 1660 - DNA, 1338 bp, synthetic construct
  source 1..1338: mol_type = other DNA; note = Keap1-(GS)5-VL12.3 nucleic acid
cagccagatcccaggcctagcggggctggggcctgctgccgattcctgcccctgcagtcacagtgccctgagggggcaggggacgcggtgatgtacgcctccactgagtgcaaggcggaggtgacgccctcccagcatggcaaccgcaccttcagctacaccctggaggatcataccaagcaggcctttggcatcatgaacgagctgcggctcagccagcagctgtgtgacgtcacactgcaggtcaagtaccaggatgcaccggccgcccagttcatggcccacaaggtggtgctggcctcatccagccctgtcttcaaggccatgttcaccaacgggctgcgggagcagggcatggaggtggtgtccattgagggtatccaccccaaggtcatggagcgcctcattgaattcgcctacacggcctccatctccatgggcgagaagtgtgtcctccacgtcatgaacggtgctgtcatgtaccagatcgacagcgttgtccgtgcctgcagtgacttcctggtgcagcagctggaccccagcaatgccatcggcatcgccaacttcgctgagcagattggctgtgtggagttgcaccagcgtgcccgggagtacatctacatgcattttggggaggtggccaagcaagaggagttcttcaacctgtcccactgccaactggtgaccctcatcagccgggacgacctgaacgtgcgctgcgagtccgaggtcttccacgcctgcatcaactgggtcaagtacgactgcgaacagcgacggttctacgtccaggcgctgctgcgggccgtgcgctgccactcgttgacgccgaacttcctgcagatgcagctgcagaagtgcgagatcctgcagtccgactcccgctgcaaggactacctggtcaagatcttcgaggagctcaccctgcacaagcccacgcaggtgatgccctgccgggcgcccggcagcggcagcggcagcggcagcggcagcggcagccaacctgtgctgacacagagccccagcgtgtccgccgctcctcggcagcgggtgaccatcagcgtgtccggctctaatagcaacatcggctccaacaccgtgaactggatccagcagctgcctggaagagcccccgagctgctgatgtacgacgacgacctgctcgccccaggcgtgtctgatagattcagcggctctagaagcggcaccagcgccagcctgaccatcagcggactgcagtctgaagatgaggccgactactacgccgctacatgggacgatagcctgaacggctgggtgttcggcggcggaacaaaggtgaccgtcctgagcggctaa

SEQ ID NO: 1661 - DNA, 1344 bp, synthetic construct
  source 1..1344: mol_type = other DNA; note = Keap1-(GS)6-VL12.3 nucleic acid
cagccagatcccaggcctagcggggctggggcctgctgccgattcctgcccctgcagtcacagtgccctgagggggcaggggacgcggtgatgtacgcctccactgagtgcaaggcggaggtgacgccctcccagcatggcaaccgcaccttcagctacaccctggaggatcataccaagcaggcctttggcatcatgaacgagctgcggctcagccagcagctgtgtgacgtcacactgcaggtcaagtaccaggatgcaccggccgcccagttcatggcccacaaggtggtgctggcctcatccagccctgtcttcaaggccatgttcaccaacgggctgcgggagcagggcatggaggtggtgtccattgagggtatccaccccaaggtcatggagcgcctcattgaattcgcctacacggcctccatctccatgggcgagaagtgtgtcctccacgtcatgaacggtgctgtcatgtaccagatcgacagcgttgtccgtgcctgcagtgacttcctggtgcagcagctggaccccagcaatgccatcggcatcgccaacttcgctgagcagattggctgtgtggagttgcaccagcgtgcccgggagtacatctacatgcattttggggaggtggccaagcaagaggagttcttcaacctgtcccactgccaactggtgaccctcatcagccgggacgacctgaacgtgcgctgcgagtccgaggtcttccacgcctgcatcaactgggtcaagtacgactgcgaacagcgacggttctacgtccaggcgctgctgcgggccgtgcgctgccactcgttgacgccgaacttcctgcagatgcagctgcagaagtgcgagatcctgcagtccgactcccgctgcaaggactacctggtcaagatcttcgaggagctcaccctgcacaagcccacgcaggtgatgccctgccgggcgcccggcagcggcagcggcagcggcagcggcagcggcagcggcagccaacctgtgctgacacagagccccagcgtgtccgccgctcctcggcagcgggtgaccatcagcgtgtccggctctaatagcaacatcggctccaacaccgtgaactggatccagcagctgcctggaagagcccccgagctgctgatgtacgacgacgacctgctcgccccaggcgtgtctgatagattcagcggctctagaagcggcaccagcgccagcctgaccatcagcggactgcagtctgaagatgaggccgactactacgccgctacatgggacgatagcctgaacggctgggtgttcggcggcggaacaaaggtgaccgtcctgagcggctaa

SEQ ID NO: 1662 - DNA, 1362 bp, synthetic construct
  source 1..1362: mol_type = other DNA; note = HA-Keap1-(GS)1-VL12.3 nucleic acid
atgtacccatacgatgttccagattacgctggcagcggcagcggcagccagccagatcccaggcctagcggggctggggcctgctgccgattcctgcccctgcagtcacagtgccctgagggggcaggggacgcggtgatgtacgcctccactgagtgcaaggcggaggtgacgccctcccagcatggcaaccgcaccttcagctacaccctggaggatcataccaagcaggcctttggcatcatgaacgagctgcggctcagccagcagctgtgtgacgtcacactgcaggtcaagtaccaggatgcaccggccgcccagttcatggcccacaaggtggtgctggcctcatccagccctgtcttcaaggccatgttcaccaacgggctgcgggagcagggcatggaggtggtgtccattgagggtatccaccccaaggtcatggagcgcctcattgaattcgcctacacggcctccatctccatgggcgagaagtgtgtcctccacgtcatgaacggtgctgtcatgtaccagatcgacagcgttgtccgtgcctgcagtgacttcctggtgcagcagctggaccccagcaatgccatcggcatcgccaacttcgctgagcagattggctgtgtggagttgcaccagcgtgcccgggagtacatctacatgcattttggggaggtggccaagcaagaggagttcttcaacctgtcccactgccaactggtgaccctcatcagccgggacgacctgaacgtgcgctgcgagtccgaggtcttccacgcctgcatcaactgggtcaagtacgactgcgaacagcgacggttctacgtccaggcgctgctgcgggccgtgcgctgccactcgttgacgccgaacttcctgcagatgcagctgcagaagtgcgagatcctgcagtccgactcccgctgcaaggactacctggtcaagatcttcgaggagctcaccctgcacaagcccacgcaggtgatgccctgccgggcgcccggcagcggcagccaacctgtgctgacacagagccccagcgtgtccgccgctcctcggcagcgggtgaccatcagcgtgtccggctctaatagcaacatcggctccaacaccgtgaactggatccagcagctgcctggaagagcccccgagctgctgatgtacgacgacgacctgctcgccccaggcgtgtctgatagattcagcggctctagaagcggcaccagcgccagcctgaccatcagcggactgcagtctgaagatgaggccgactactacgccgctacatgggacgatagcctgaacggctgggtgttcggcggcggaacaaaggtgaccgtcctgagcggctaa

SEQ ID NO: 1663 - DNA, 1368 bp, synthetic construct
  source 1..1368: mol_type = other DNA; note = HA-Keap1-(GS)2-VL12.3 nucleic acid
atgtacccatacgatgttccagattacgctggcagcggcagcggcagccagccagatcccaggcctagcggggctggggcctgctgccgattcctgcccctgcagtcacagtgccctgagggggcaggggacgcggtgatgtacgcctccactgagtgcaaggcggaggtgacgccctcccagcatggcaaccgcaccttcagctacaccctggaggatcataccaagcaggcctttggcatcatgaacgagctgcggctcagccagcagctgtgtgacgtcacactgcaggtcaagtaccaggatgcaccggccgcccagttcatggcccacaaggtggtgctggcctcatccagccctgtcttcaaggccatgttcaccaacgggctgcgggagcagggcatggaggtggtgtccattgagggtatccaccccaaggtcatggagcgcctcattgaattcgcctacacggcctccatctccatgggcgagaagtgtgtcctccacgtcatgaacggtgctgtcatgtaccagatcgacagcgttgtccgtgcctgcagtgacttcctggtgcagcagctggaccccagcaatgccatcggcatcgccaacttcgctgagcagattggctgtgtggagttgcaccagcgtgcccgggagtacatctacatgcattttggggaggtggccaagcaagaggagttcttcaacctgtcccactgccaactggtgaccctcatcagccgggacgacctgaacgtgcgctgcgagtccgaggtcttccacgcctgcatcaactgggtcaagtacgactgcgaacagcgacggttctacgtccaggcgctgctgcgggccgtgcgctgccactcgttgacgccgaacttcctgcagatgcagctgcagaagtgcgagatcctgcagtccgactcccgctgcaaggactacctggtcaagatcttcgaggagctcaccctgcacaagcccacgcaggtgatgccctgccgggcgcccggcagcggcagcggcagccaacctgtgctgacacagagccccagcgtgtccgccgctcctcggcagcgggtgaccatcagcgtgtccggctctaatagcaacatcggctccaacaccgtgaactggatccagcagctgcctggaagagcccccgagctgctgatgtacgacgacgacctgctcgccccaggcgtgtctgatagattcagcggctctagaagcggcaccagcgccagcctgaccatcagcggactgcagtctgaagatgaggccgactactacgccgctacatgggacgatagcctgaacggctgggtgttcggcggcggaacaaaggtgaccgtcctgagcggctaa

SEQ ID NO: 1664 - DNA, 1374 bp, synthetic construct
  source 1..1374: mol_type = other DNA; note = HA-Keap1-(GS)3-VL12.3 nucleic acid
atgtacccatacgatgttccagattacgctggcagcggcagcggcagccagccagatcccaggcctagcggggctggggcctgctgccgattcctgcccctgcagtcacagtgccctgagggggcaggggacgcggtgatgtacgcctccactgagtgcaaggcggaggtgacgccctcccagcatggcaaccgcaccttcagctacaccctggaggatcataccaagcaggcctttggcatcatgaacgagctgcggctcagccagcagctgtgtgacgtcacactgcaggtcaagtaccaggatgcaccggccgcccagttcatggcccacaaggtggtgctggcctcatccagccctgtcttcaaggccatgttcaccaacgggctgcgggagcagggcatggaggtggtgtccattgagggtatccaccccaaggtcatggagcgcctcattgaattcgcctacacggcctccatctccatgggcgagaagtgtgtcctccacgtcatgaacggtgctgtcatgtaccagatcgacagcgttgtccgtgcctgcagtgacttcctggtgcagcagctggaccccagcaatgccatcggcatcgccaacttcgctgagcagattggctgtgtggagttgcaccagcgtgcccgggagtacatctacatgcattttggggaggtggccaagcaagaggagttcttcaacctgtcccactgccaactggtgaccctcatcagccgggacgacctgaacgtgcgctgcgagtccgaggtcttccacgcctgcatcaactgggtcaagtacgactgcgaacagcgacggttctacgtccaggcgctgctgcgggccgtgcgctgccactcgttgacgccgaacttcctgcagatgcagctgcagaagtgcgagatcctgcagtccgactcccgctgcaaggactacctggtcaagatcttcgaggagctcaccctgcacaagcccacgcaggtgatgccctgccgggcgcccggcagcggcagcggcagcggcagccaacctgtgctgacacagagccccagcgtgtccgccgctcctcggcagcgggtgaccatcagcgtgtccggctctaatagcaacatcggctccaacaccgtgaactggatccagcagctgcctggaagagcccccgagctgctgatgtacgacgacgacctgctcgccccaggcgtgtctgatagattcagcggctctagaagcggcaccagcgccagcctgaccatcagcggactgcagtctgaagatgaggccgactactacgccgctacatgggacgatagcctgaacggctgggtgttcggcggcggaacaaaggtgaccgtcctgagcggctaa

SEQ ID NO: 1665 - DNA, 1380 bp, synthetic construct
  source 1..1380: mol_type = other DNA; note = HA-Keap1-(GS)4-VL12.3 nucleic acid
atgtacccatacgatgttccagattacgctggcagcggcagcggcagccagccagatcccaggcctagcggggctggggcctgctgccgattcctgcccctgcagtcacagtgccctgagggggcaggggacgcggtgatgtacgcctccactgagtgcaaggcggaggtgacgccctcccagcatggcaaccgcaccttcagctacaccctggaggatcataccaagcaggcctttggcatcatgaacgagctgcggctcagccagcagctgtgtgacgtcacactgcaggtcaagtaccaggatgcaccggccgcccagttcatggcccacaaggtggtgctggcctcatccagccctgtcttcaaggccatgttcaccaacgggctgcgggagcagggcatggaggtggtgtccattgagggtatccaccccaaggtcatggagcgcctcattgaattcgcctacacggcctccatctccatgggcgagaagtgtgtcctccacgtcatgaacggtgctgtcatgtaccagatcgacagcgttgtccgtgcctgcagtgacttcctggtgcagcagctggaccccagcaatgccatcggcatcgccaacttcgctgagcagattggctgtgtggagttgcaccagcgtgcccgggagtacatctacatgcattttggggaggtggccaagcaagaggagttcttcaacctgtcccactgccaactggtgaccctcatcagccgggacgacctgaacgtgcgctgcgagtccgaggtcttccacgcctgcatcaactgggtcaagtacgactgcgaacagcgacggttctacgtccaggcgctgctgcgggccgtgcgctgccactcgttgacgccgaacttcctgcagatgcagctgcagaagtgcgagatcctgcagtccgactcccgctgcaaggactacctggtcaagatcttcgaggagctcaccctgcacaagcccacgcaggtgatgccctgccgggcgcccggcagcggcagcggcagcggcagcggcagccaacctgtgctgacacagagccccagcgtgtccgccgctcctcggcagcgggtgaccatcagcgtgtccggctctaatagcaacatcggctccaacaccgtgaactggatccagcagctgcctggaagagcccccgagctgctgatgtacgacgacgacctgctcgccccaggcgtgtctgatagattcagcggctctagaagcggcaccagcgccagcctgaccatcagcggactgcagtctgaagatgaggccgactactacgccgctacatgggacgatagcctgaacggctgggtgttcggcggcggaacaaaggtgaccgtcctgagcggctaa

SEQ ID NO: 1666 - DNA, 1386 bp, synthetic construct
  source 1..1386: mol_type = other DNA; note = HA-Keap1-(GS)5-VL12.3 nucleic acid
atgtacccatacgatgttccagattacgctggcagcggcagcggcagccagccagatcccaggcctagcggggctggggcctgctgccgattcctgcccctgcagtcacagtgccctgagggggcaggggacgcggtgatgtacgcctccactgagtgcaaggcggaggtgacgccctcccagcatggcaaccgcaccttcagctacaccctggaggatcataccaagcaggcctttggcatcatgaacgagctgcggctcagccagcagctgtgtgacgtcacactgcaggtcaagtaccaggatgcaccggccgcccagttcatggcccacaaggtggtgctggcctcatccagccctgtcttcaaggccatgttcaccaacgggctgcgggagcagggcatggaggtggtgtccattgagggtatccaccccaaggtcatggagcgcctcattgaattcgcctacacggcctccatctccatgggcgagaagtgtgtcctccacgtcatgaacggtgctgtcatgtaccagatcgacagcgttgtccgtgcctgcagtgacttcctggtgcagcagctggaccccagcaatgccatcggcatcgccaacttcgctgagcagattggctgtgtggagttgcaccagcgtgcccgggagtacatctacatgcattttggggaggtggccaagcaagaggagttcttcaacctgtcccactgccaactggtgaccctcatcagccgggacgacctgaacgtgcgctgcgagtccgaggtcttccacgcctgcatcaactgggtcaagtacgactgcgaacagcgacggttctacgtccaggcgctgctgcgggccgtgcgctgccactcgttgacgccgaacttcctgcagatgcagctgcagaagtgcgagatcctgcagtccgactcccgctgcaaggactacctggtcaagatcttcgaggagctcaccctgcacaagcccacgcaggtgatgccctgccgggcgcccggcagcggcagcggcagcggcagcggcagcggcagccaacctgtgctgacacagagccccagcgtgtccgccgctcctcggcagcgggtgaccatcagcgtgtccggctctaatagcaacatcggctccaacaccgtgaactggatccagcagctgcctggaagagcccccgagctgctgatgtacgacgacgacctgctcgccccaggcgtgtctgatagattcagcggctctagaagcggcaccagcgccagcctgaccatcagcggactgcagtctgaagatgaggccgactactacgccgctacatgggacgatagcctgaacggctgggtgttcggcggcggaacaaaggtgaccgtcctgagcggctaa

SEQ ID NO: 1667 - DNA, 1392 bp, synthetic construct
  source 1..1392: mol_type = other DNA; note = HA-Keap1-(GS)6-VL12.3 nucleic acid
atgtacccatacgatgttccagattacgctggcagcggcagcggcagccagccagatcccaggcctagcggggctggggcctgctgccgattcctgcccctgcagtcacagtgccctgagggggcaggggacgcggtgatgtacgcctccactgagtgcaaggcggaggtgacgccctcccagcatggcaaccgcaccttcagctacaccctggaggatcataccaagcaggcctttggcatcatgaacgagctgcggctcagccagcagctgtgtgacgtcacactgcaggtcaagtaccaggatgcaccggccgcccagttcatggcccacaaggtggtgctggcctcatccagccctgtcttcaaggccatgttcaccaacgggctgcgggagcagggcatggaggtggtgtccattgagggtatccaccccaaggtcatggagcgcctcattgaattcgcctacacggcctccatctccatgggcgagaagtgtgtcctccacgtcatgaacggtgctgtcatgtaccagatcgacagcgttgtccgtgcctgcagtgacttcctggtgcagcagctggaccccagcaatgccatcggcatcgccaacttcgctgagcagattggctgtgtggagttgcaccagcgtgcccgggagtacatctacatgcattttggggaggtggccaagcaagaggagttcttcaacctgtcccactgccaactggtgaccctcatcagccgggacgacctgaacgtgcgctgcgagtccgaggtcttccacgcctgcatcaactgggtcaagtacgactgcgaacagcgacggttctacgtccaggcgctgctgcgggccgtgcgctgccactcgttgacgccgaacttcctgcagatgcagctgcagaagtgcgagatcctgcagtccgactcccgctgcaaggactacctggtcaagatcttcgaggagctcaccctgcacaagcccacgcaggtgatgccctgccgggcgcccggcagcggcagcggcagcggcagcggcagcggcagcggcagccaacctgtgctgacacagagccccagcgtgtccgccgctcctcggcagcgggtgaccatcagcgtgtccggctctaatagcaacatcggctccaacaccgtgaactggatccagcagctgcctggaagagcccccgagctgctgatgtacgacgacgacctgctcgccccaggcgtgtctgatagattcagcggctctagaagcggcaccagcgccagcctgaccatcagcggactgcagtctgaagatgaggccgactactacgccgctacatgggacgatagcctgaacggctgggtgttcggcggcggaacaaaggtgaccgtcctgagcggctaa

SEQ ID NO: 1668 - DNA, 732 bp, synthetic construct
  source 1..732: mol_type = other DNA; note = RNF125-(GS)1-VL12.3 nucleic acid
ggctccgtgctgagcaccgacagcggcaaatcggcgcccgcctctgccaccgcgcgggccctggagcgcaggagggacccggagttgcccgtcacgtccttcgactgcgccgtgtgccttgaggtgttacaccagcctgtccggacccgctgcggccacgtattctgccgttcctgtattgctaccagtctgaagaacaacaagtggacctgtccttattgccgggcatatcttccttcagaaggagttccagcaactgatgtagccaaaagaatgaaatcagagtataagaactgcgctgagtgtgacaccctggtttgcctcagtgaaatgagggcacatattcggacttgtcagaagtacatagataagtatggaccaggcagcggcagccaacctgtgctgacacagagccccagcgtgtccgccgctcctcggcagcgggtgaccatcagcgtgtccggctctaatagcaacatcggctccaacaccgtgaactggatccagcagctgcctggaagagcccccgagctgctgatgtacgacgacgacctgctcgccccaggcgtgtctgatagattcagcggctctagaagcggcaccagcgccagcctgaccatcagcggactgcagtctgaagatgaggccgactactacgccgctacatgggacgatagcctgaacggctgggtgttcggcggcggaacaaaggtgaccgtcctgagcggctaa

SEQ ID NO: 1669 - DNA, 738 bp, synthetic construct
  source 1..738: mol_type = other DNA; note = RNF125-(GS)2-VL12.3 nucleic acid
ggctccgtgctgagcaccgacagcggcaaatcggcgcccgcctctgccaccgcgcgggccctggagcgcaggagggacccggagttgcccgtcacgtccttcgactgcgccgtgtgccttgaggtgttacaccagcctgtccggacccgctgcggccacgtattctgccgttcctgtattgctaccagtctgaagaacaacaagtggacctgtccttattgccgggcatatcttccttcagaaggagttccagcaactgatgtagccaaaagaatgaaatcagagtataagaactgcgctgagtgtgacaccctggtttgcctcagtgaaatgagggcacatattcggacttgtcagaagtacatagataagtatggaccaggcagcggcagcggcagccaacctgtgctgacacagagccccagcgtgtccgccgctcctcggcagcgggtgaccatcagcgtgtccggctctaatagcaacatcggctccaacaccgtgaactggatccagcagctgcctggaagagcccccgagctgctgatgtacgacgacgacctgctcgccccaggcgtgtctgatagattcagcggctctagaagcggcaccagcgccagcctgaccatcagcggactgcagtctgaagatgaggccgactactacgccgctacatgggacgatagcctgaacggctgggtgttcggcggcggaacaaaggtgaccgtcctgagcggctaa

SEQ ID NO: 1670 - DNA, 744 bp, synthetic construct
  source 1..744: mol_type = other DNA; note = RNF125-(GS)3-VL12.3 nucleic acid
ggctccgtgctgagcaccgacagcggcaaatcggcgcccgcctctgccaccgcgcgggccctggagcgcaggagggacccggagttgcccgtcacgtccttcgactgcgccgtgtgccttgaggtgttacaccagcctgtccggacccgctgcggccacgtattctgccgttcctgtattgctaccagtctgaagaacaacaagtggacctgtccttattgccgggcatatcttccttcagaaggagttccagcaactgatgtagccaaaagaatgaaatcagagtataagaactgcgctgagtgtgacaccctggtttgcctcagtgaaatgagggcacatattcggacttgtcagaagtacatagataagtatggaccaggcagcggcagcggcagcggcagccaacctgtgctgacacagagccccagcgtgtccgccgctcctcggcagcgggtgaccatcagcgtgtccggctctaatagcaacatcggctccaacaccgtgaactggatccagcagctgcctggaagagcccccgagctgctgatgtacgacgacgacctgctcgccccaggcgtgtctgatagattcagcggctctagaagcggcaccagcgccagcctgaccatcagcggactgcagtctgaagatgaggccgactactacgccgctacatgggacgatagcctgaacggctgggtgttcggcggcggaacaaaggtgaccgtcctgagcggctaa

SEQ ID NO: 1671 - DNA, 750 bp, synthetic construct
  source 1..750: mol_type = other DNA; note = RNF125-(GS)4-VL12.3 nucleic acid
ggctccgtgctgagcaccgacagcggcaaatcggcgcccgcctctgccaccgcgcgggccctggagcgcaggagggacccggagttgcccgtcacgtccttcgactgcgccgtgtgccttgaggtgttacaccagcctgtccggacccgctgcggccacgtattctgccgttcctgtattgctaccagtctgaagaacaacaagtggacctgtccttattgccgggcatatcttccttcagaaggagttccagcaactgatgtagccaaaagaatgaaatcagagtataagaactgcgctgagtgtgacaccctggtttgcctcagtgaaatgagggcacatattcggacttgtcagaagtacatagataagtatggaccaggcagcggcagcggcagcggcagcggcagccaacctgtgctgacacagagccccagcgtgtccgccgctcctcggcagcgggtgaccatcagcgtgtccggctctaatagcaacatcggctccaacaccgtgaactggatccagcagctgcctggaagagcccccgagctgctgatgtacgacgacgacctgctcgccccaggcgtgtctgatagattcagcggctctagaagcggcaccagcgccagcctgaccatcagcggactgcagtctgaagatgaggccgactactacgccgctacatgggacgatagcctgaacggctgggtgttcggcggcggaacaaaggtgaccgtcctgagcggctaa

SEQ ID NO: 1672 - DNA, 756 bp, synthetic construct
  source 1..756: mol_type = other DNA; note = RNF125-(GS)5-VL12.3 nucleic acid
ggctccgtgctgagcaccgacagcggcaaatcggcgcccgcctctgccaccgcgcgggccctggagcgcaggagggacccggagttgcccgtcacgtccttcgactgcgccgtgtgccttgaggtgttacaccagcctgtccggacccgctgcggccacgtattctgccgttcctgtattgctaccagtctgaagaacaacaagtggacctgtccttattgccgggcatatcttccttcagaaggagttccagcaactgatgtagccaaaagaatgaaatcagagtataagaactgcgctgagtgtgacaccctggtttgcctcagtgaaatgagggcacatattcggacttgtcagaagtacatagataagtatggaccaggcagcggcagcggcagcggcagcggcagcggcagccaacctgtgctgacacagagccccagcgtgtccgccgctcctcggcagcgggtgaccatcagcgtgtccggctctaatagcaacatcggctccaacaccgtgaactggatccagcagctgcctggaagagcccccgagctgctgatgtacgacgacgacctgctcgccccaggcgtgtctgatagattcagcggctctagaagcggcaccagcgccagcctgaccatcagcggactgcagtctgaagatgaggccgactactacgccgctacatgggacgatagcctgaacggctgggtgttcggcggcggaacaaaggtgaccgtcctgagcggctaa

SEQ ID NO: 1673 - DNA, 762 bp, synthetic construct
  source 1..762: mol_type = other DNA; note = RNF125-(GS)6-VL12.3 nucleic acid
ggctccgtgctgagcaccgacagcggcaaatcggcgcccgcctctgccaccgcgcgggccctggagcgcaggagggacccggagttgcccgtcacgtccttcgactgcgccgtgtgccttgaggtgttacaccagcctgtccggacccgctgcggccacgtattctgccgttcctgtattgctaccagtctgaagaacaacaagtggacctgtccttattgccgggcatatcttccttcagaaggagttccagcaactgatgtagccaaaagaatgaaatcagagtataagaactgcgctgagtgtgacaccctggtttgcctcagtgaaatgagggcacatattcggacttgtcagaagtacatagataagtatggaccaggcagcggcagcggcagcggcagcggcagcggcagcggcagccaacctgtgctgacacagagccccagcgtgtccgccgctcctcggcagcgggtgaccatcagcgtgtccggctctaatagcaacatcggctccaacaccgtgaactggatccagcagctgcctggaagagcccccgagctgctgatgtacgacgacgacctgctcgccccaggcgtgtctgatagattcagcggctctagaagcggcaccagcgccagcctgaccatcagcggactgcagtctgaagatgaggccgactactacgccgctacatgggacgatagcctgaacggctgggtgttcggcggcggaacaaaggtgaccgtcctgagcggctaa

SEQ ID NO: 1674 - DNA, 780 bp, synthetic construct
  source 1..780: mol_type = other DNA; note = HA-RNF125-(GS)1-VL12.3 nucleic acid
atgtacccatacgatgttccagattacgctggcagcggcagcggcagcggctccgtgctgagcaccgacagcggcaaatcggcgcccgcctctgccaccgcgcgggccctggagcgcaggagggacccggagttgcccgtcacgtccttcgactgcgccgtgtgccttgaggtgttacaccagcctgtccggacccgctgcggccacgtattctgccgttcctgtattgctaccagtctgaagaacaacaagtggacctgtccttattgccgggcatatcttccttcagaaggagttccagcaactgatgtagccaaaagaatgaaatcagagtataagaactgcgctgagtgtgacaccctggtttgcctcagtgaaatgagggcacatattcggacttgtcagaagtacatagataagtatggaccaggcagcggcagccaacctgtgctgacacagagccccagcgtgtccgccgctcctcggcagcgggtgaccatcagcgtgtccggctctaatagcaacatcggctccaacaccgtgaactggatccagcagctgcctggaagagcccccgagctgctgatgtacgacgacgacctgctcgccccaggcgtgtctgatagattcagcggctctagaagcggcaccagcgccagcctgaccatcagcggactgcagtctgaagatgaggccgactactacgccgctacatgggacgatagcctgaacggctgggtgttcggcggcggaacaaaggtgaccgtcctgagcggctaa

SEQ ID NO: 1675 - DNA, 786 bp, synthetic construct
  source 1..786: mol_type = other DNA; note = HA-RNF125-(GS)2-VL12.3 nucleic acid
atgtacccatacgatgttccagattacgctggcagcggcagcggcagcggctccgtgctgagcaccgacagcggcaaatcggcgcccgcctctgccaccgcgcgggccctggagcgcaggagggacccggagttgcccgtcacgtccttcgactgcgccgtgtgccttgaggtgttacaccagcctgtccggacccgctgcggccacgtattctgccgttcctgtattgctaccagtctgaagaacaacaagtggacctgtccttattgccgggcatatcttccttcagaaggagttccagcaactgatgtagccaaaagaatgaaatcagagtataagaactgcgctgagtgtgacaccctggtttgcctcagtgaaatgagggcacatattcggacttgtcagaagtacatagataagtatggaccaggcagcggcagcggcagccaacctgtgctgacacagagccccagcgtgtccgccgctcctcggcagcgggtgaccatcagcgtgtccggctctaatagcaacatcggctccaacaccgtgaactggatccagcagctgcctggaagagcccccgagctgctgatgtacgacgacgacctgctcgccccaggcgtgtctgatagattcagcggctctagaagcggcaccagcgccagcctgaccatcagcggactgcagtctgaagatgaggccgactactacgccgctacatgggacgatagcctgaacggctgggtgttcggcggcggaacaaaggtgaccgtcctgagcggctaa

SEQ ID NO: 1676 - DNA, 792 bp, synthetic construct
  source 1..792: mol_type = other DNA; note = HA-RNF125-(GS)3-VL12.3 nucleic acid
atgtacccatacgatgttccagattacgctggcagcggcagcggcagcggctccgtgctgagcaccgacagcggcaaatcggcgcccgcctctgccaccgcgcgggccctggagcgcaggagggacccggagttgcccgtcacgtccttcgactgcgccgtgtgccttgaggtgttacaccagcctgtccggacccgctgcggccacgtattctgccgttcctgtattgctaccagtctgaagaacaacaagtggacctgtccttattgccgggcatatcttccttcagaaggagttccagcaactgatgtagccaaaagaatgaaatcagagtataagaactgcgctgagtgtgacaccctggtttgcctcagtgaaatgagggcacatattcggacttgtcagaagtacatagataagtatggaccaggcagcggcagcggcagcggcagccaacctgtgctgacacagagccccagcgtgtccgccgctcctcggcagcgggtgaccatcagcgtgtccggctctaatagcaacatcggctccaacaccgtgaactggatccagcagctgcctggaagagcccccgagctgctgatgtacgacgacgacctgctcgccccaggcgtgtctgatagattcagcggctctagaagcggcaccagcgccagcctgaccatcagcggactgcagtctgaagatgaggccgactactacgccgctacatgggacgatagcctgaacggctgggtgttcggcggcggaacaaaggtgaccgtcctgagcggctaa

SEQ ID NO: 1677 - DNA, 798 bp, synthetic construct
  source 1..798: mol_type = other DNA; note = HA-RNF125-(GS)4-VL12.3 nucleic acid
atgtacccatacgatgttccagattacgctggcagcggcagcggcagcggctccgtgctgagcaccgacagcggcaaatcggcgcccgcctctgccaccgcgcgggccctggagcgcaggagggacccggagttgcccgtcacgtccttcgactgcgccgtgtgccttgaggtgttacaccagcctgtccggacccgctgcggccacgtattctgccgttcctgtattgctaccagtctgaagaacaacaagtggacctgtccttattgccgggcatatcttccttcagaaggagttccagcaactgatgtagccaaaagaatgaaatcagagtataagaactgcgctgagtgtgacaccctggtttgcctcagtgaaatgagggcacatattcggacttgtcagaagtacatagataagtatggaccaggcagcggcagcggcagcggcagcggcagccaacctgtgctgacacagagccccagcgtgtccgccgctcctcggcagcgggtgaccatcagcgtgtccggctctaatagcaacatcggctccaacaccgtgaactggatccagcagctgcctggaagagcccccgagctgctgatgtacgacgacgacctgctcgccccaggcgtgtctgatagattcagcggctctagaagcggcaccagcgccagcctgaccatcagcggactgcagtctgaagatgaggccgactactacgccgctacatgggacgatagcctgaacggctgggtgttcggcggcggaacaaaggtgaccgtcctgagcggctaa

SEQ ID NO: 1678 - DNA, 804 bp, synthetic construct
  source 1..804: mol_type = other DNA; note = HA-RNF125-(GS)5-VL12.3 nucleic acid
atgtacccatacgatgttccagattacgctggcagcggcagcggcagcggctccgtgctgagcaccgacagcggcaaatcggcgcccgcctctgccaccgcgcgggccctggagcgcaggagggacccggagttgcccgtcacgtccttcgactgcgccgtgtgccttgaggtgttacaccagcctgtccggacccgctgcggccacgtattctgccgttcctgtattgctaccagtctgaagaacaacaagtggacctgtccttattgccgggcatatcttccttcagaaggagttccagcaactgatgtagccaaaagaatgaaatcagagtataagaactgcgctgagtgtgacaccctggtttgcctcagtgaaatgagggcacatattcggacttgtcagaagtacatagataagtatggaccaggcagcggcagcggcagcggcagcggcagcggcagccaacctgtgctgacacagagccccagcgtgtccgccgctcctcggcagcgggtgaccatcagcgtgtccggctctaatagcaacatcggctccaacaccgtgaactggatccagcagctgcctggaagagcccccgagctgctgatgtacgacgacgacctgctcgccccaggcgtgtctgatagattcagcggctctagaagcggcaccagcgccagcctgaccatcagcggactgcagtctgaagatgaggccgactactacgccgctacatgggacgatagcctgaacggctgggtgttcggcggcggaacaaaggtgaccgtcctgagcggctaa

SEQ ID NO: 1679 - DNA, 810 bp, synthetic construct
  source 1..810: mol_type = other DNA; note = HA-RNF125-(GS)6-VL12.3 nucleic acid
atgtacccatacgatgttccagattacgctggcagcggcagcggcagcggctccgtgctgagcaccgacagcggcaaatcggcgcccgcctctgccaccgcgcgggccctggagcgcaggagggacccggagttgcccgtcacgtccttcgactgcgccgtgtgccttgaggtgttacaccagcctgtccggacccgctgcggccacgtattctgccgttcctgtattgctaccagtctgaagaacaacaagtggacctgtccttattgccgggcatatcttccttcagaaggagttccagcaactgatgtagccaaaagaatgaaatcagagtataagaactgcgctgagtgtgacaccctggtttgcctcagtgaaatgagggcacatattcggacttgtcagaagtacatagataagtatggaccaggcagcggcagcggcagcggcagcggcagcggcagcggcagccaacctgtgctgacacagagccccagcgtgtccgccgctcctcggcagcgggtgaccatcagcgtgtccggctctaatagcaacatcggctccaacaccgtgaactggatccagcagctgcctggaagagcccccgagctgctgatgtacgacgacgacctgctcgccccaggcgtgtctgatagattcagcggctctagaagcggcaccagcgccagcctgaccatcagcggactgcagtctgaagatgaggccgactactacgccgctacatgggacgatagcctgaacggctgggtgttcggcggcggaacaaaggtgaccgtcctgagcggctaa

SEQ ID NO: 1680 - DNA, 711 bp, synthetic construct
  source 1..711: mol_type = other DNA; note = TCF4-(GS)1-CHIP-NLS nucleic acid
atggatgacctaggcgccaacgacgaactgatttccttcaaagacgagggcgaacaggaggagaagagctccgaaaactcctcggcagagagggatttagctgatgtcaaatcgtctctagtcaatgaatcagaaacgggcagccggctgaacttcggggacgacatccccagcgctcttcgaatcgcgaagaagaagcgctggaacagcattgaggagcggcgcatccaccaggagagcgagctgcactcctacctctccaggctcattgccgcggagcgtgagagggagctggaagagtgccagcgaaaccacgagggtgatgaggacgacagccacgtccgggcccagcaggcctgcattgaggccaagcacgacaagtacatggcggacatggacgagcttttttctcaggtggatgagaagaggaagaagcgagacatccccgactacctgtgtggcaagatcagctttgagctgatgcgggagccgtgcatcacgcccagtggcatcacctacgaccgcaaggacatcgaggagcacctgcagcgtgtgggtcattttgacccggtgaccaggagccccctgacccaggaacagctcatccccaacttggctatgaaggaggttattgacgcattcatctctgagaatggctgggtggaggactacggcagcggcagcccggcggcgaaacgcgtgaaactggat

SEQ ID NO: 1681 - DNA, 717 bp, synthetic construct
  source 1..717: mol_type = other DNA; note = TCF4-(GS)2-CHIP-NLS nucleic acid
atggatgacctaggcgccaacgacgaactgatttccttcaaagacgagggcgaacaggaggagaagagctccgaaaactcctcggcagagagggatttagctgatgtcaaatcgtctctagtcaatgaatcagaaacgggcagcggcagccggctgaacttcggggacgacatccccagcgctcttcgaatcgcgaagaagaagcgctggaacagcattgaggagcggcgcatccaccaggagagcgagctgcactcctacctctccaggctcattgccgcggagcgtgagagggagctggaagagtgccagcgaaaccacgagggtgatgaggacgacagccacgtccgggcccagcaggcctgcattgaggccaagcacgacaagtacatggcggacatggacgagcttttttctcaggtggatgagaagaggaagaagcgagacatccccgactacctgtgtggcaagatcagctttgagctgatgcgggagccgtgcatcacgcccagtggcatcacctacgaccgcaaggacatcgaggagcacctgcagcgtgtgggtcattttgacccggtgaccaggagccccctgacccaggaacagctcatccccaacttggctatgaaggaggttattgacgcattcatctctgagaatggctgggtggaggactacggcagcggcagcccggcggcgaaacgcgtgaaactggat

SEQ ID NO: 1682 - DNA, 723 bp, synthetic construct
  source 1..723: mol_type = other DNA; note = TCF4-(GS)3-CHIP-NLS nucleic acid
atggatgacctaggcgccaacgacgaactgatttccttcaaagacgagggcgaacaggaggagaagagctccgaaaactcctcggcagagagggatttagctgatgtcaaatcgtctctagtcaatgaatcagaaacgggcagcggcagcggcagccggctgaacttcggggacgacatccccagcgctcttcgaatcgcgaagaagaagcgctggaacagcattgaggagcggcgcatccaccaggagagcgagctgcactcctacctctccaggctcattgccgcggagcgtgagagggagctggaagagtgccagcgaaaccacgagggtgatgaggacgacagccacgtccgggcccagcaggcctgcattgaggccaagcacgacaagtacatggcggacatggacgagcttttttctcaggtggatgagaagaggaagaagcgagacatccccgactacctgtgtggcaagatcagctttgagctgatgcgggagccgtgcatcacgcccagtggcatcacctacgaccgcaaggacatcgaggagcacctgcagcgtgtgggtcattttgacccggtgaccaggagccccctgacccaggaacagctcatccccaacttggctatgaaggaggttattgacgcattcatctctgagaatggctgggtggaggactacggcagcggcagcccggcggcgaaacgcgtgaaactggat

SEQ ID NO: 1683 - DNA, 729 bp, synthetic construct
  source 1..729: mol_type = other DNA; note = TCF4-(GS)4-CHIP-NLS nucleic acid
atggatgacctaggcgccaacgacgaactgatttccttcaaagacgagggcgaacaggaggagaagagctccgaaaactcctcggcagagagggatttagctgatgtcaaatcgtctctagtcaatgaatcagaaacgggcagcggcagcggcagcggcagccggctgaacttcggggacgacatccccagcgctcttcgaatcgcgaagaagaagcgctggaacagcattgaggagcggcgcatccaccaggagagcgagctgcactcctacctctccaggctcattgccgcggagcgtgagagggagctggaagagtgccagcgaaaccacgagggtgatgaggacgacagccacgtccgggcccagcaggcctgcattgaggccaagcacgacaagtacatggcggacatggacgagcttttttctcaggtggatgagaagaggaagaagcgagacatccccgactacctgtgtggcaagatcagctttgagctgatgcgggagccgtgcatcacgcccagtggcatcacctacgaccgcaaggacatcgaggagcacctgcagcgtgtgggtcattttgacccggtgaccaggagccccctgacccaggaacagctcatccccaacttggctatgaaggaggttattgacgcattcatctctgagaatggctgggtggaggactacggcagcggcagcccggcggcgaaacgcgtgaaactggat

SEQ ID NO: 1684 - DNA, 735 bp, synthetic construct
  source 1..735: mol_type = other DNA; note = TCF4-(GS)5-CHIP-NLS nucleic acid
atggatgacctaggcgccaacgacgaactgatttccttcaaagacgagggcgaacaggaggagaagagctccgaaaactcctcggcagagagggatttagctgatgtcaaatcgtctctagtcaatgaatcagaaacgggcagcggcagcggcagcggcagcggcagccggctgaacttcggggacgacatccccagcgctcttcgaatcgcgaagaagaagcgctggaacagcattgaggagcggcgcatccaccaggagagcgagctgcactcctacctctccaggctcattgccgcggagcgtgagagggagctggaagagtgccagcgaaaccacgagggtgatgaggacgacagccacgtccgggcccagcaggcctgcattgaggccaagcacgacaagtacatggcggacatggacgagcttttttctcaggtggatgagaagaggaagaagcgagacatccccgactacctgtgtggcaagatcagctttgagctgatgcgggagccgtgcatcacgcccagtggcatcacctacgaccgcaaggacatcgaggagcacctgcagcgtgtgggtcattttgacccggtgaccaggagccccctgacccaggaacagctcatccccaacttggctatgaaggaggttattgacgcattcatctctgagaatggctgggtggaggactacggcagcggcagcccggcggcgaaacgcgtgaaactggat

SEQ ID NO: 1685 - DNA, 741 bp, synthetic construct
  source 1..741: mol_type = other DNA; note = TCF4-(GS)6-CHIP-NLS nucleic acid
atggatgacctaggcgccaacgacgaactgatttccttcaaagacgagggcgaacaggaggagaagagctccgaaaactcctcggcagagagggatttagctgatgtcaaatcgtctctagtcaatgaatcagaaacgggcagcggcagcggcagcggcagcggcagcggcagccggctgaacttcggggacgacatccccagcgctcttcgaatcgcgaagaagaagcgctggaacagcattgaggagcggcgcatccaccaggagagcgagctgcactcctacctctccaggctcattgccgcggagcgtgagagggagctggaagagtgccagcgaaaccacgagggtgatgaggacgacagccacgtccgggcccagcaggcctgcattgaggccaagcacgacaagtacatggcggacatggacgagcttttttctcaggtggatgagaagaggaagaagcgagacatccccgactacctgtgtggcaagatcagctttgagctgatgcgggagccgtgcatcacgcccagtggcatcacctacgaccgcaaggacatcgaggagcacctgcagcgtgtgggtcattttgacccggtgaccaggagccccctgacccaggaacagctcatccccaacttggctatgaaggaggttattgacgcattcatctctgagaatggctgggtggaggactacggcagcggcagcccggcggcgaaacgcgtgaaactggat

SEQ ID NO: 1686 - DNA, 741 bp, synthetic construct
  source 1..741: mol_type = other DNA; note = TCF4-(GS)1-CHIP-NLS-HA nucleic acid
atggatgacctaggcgccaacgacgaactgatttccttcaaagacgagggcgaacaggaggagaagagctccgaaaactcctcggcagagagggatttagctgatgtcaaatcgtctctagtcaatgaatcagaaacgggcagccggctgaacttcggggacgacatccccagcgctcttcgaatcgcgaagaagaagcgctggaacagcattgaggagcggcgcatccaccaggagagcgagctgcactcctacctctccaggctcattgccgcggagcgtgagagggagctggaagagtgccagcgaaaccacgagggtgatgaggacgacagccacgtccgggcccagcaggcctgcattgaggccaagcacgacaagtacatggcggacatggacgagcttttttctcaggtggatgagaagaggaagaagcgagacatccccgactacctgtgtggcaagatcagctttgagctgatgcgggagccgtgcatcacgcccagtggcatcacctacgaccgcaaggacatcgaggagcacctgcagcgtgtgggtcattttgacccggtgaccaggagccccctgacccaggaacagctcatccccaacttggctatgaaggaggttattgacgcattcatctctgagaatggctgggtggaggactacggcagcggcagcccggcggcgaaacgcgtgaaactggattacccatacgatgttccagattacgcttaa

SEQ ID NO: 1687 - DNA, 747 bp, synthetic construct
  source 1..747: mol_type = other DNA; note = TCF4-(GS)2-CHIP-NLS-HA nucleic acid
atggatgacctaggcgccaacgacgaactgatttccttcaaagacgagggcgaacaggaggagaagagctccgaaaactcctcggcagagagggatttagctgatgtcaaatcgtctctagtcaatgaatcagaaacgggcagcggcagccggctgaacttcggggacgacatccccagcgctcttcgaatcgcgaagaagaagcgctggaacagcattgaggagcggcgcatccaccaggagagcgagctgcactcctacctctccaggctcattgccgcggagcgtgagagggagctggaagagtgccagcgaaaccacgagggtgatgaggacgacagccacgtccgggcccagcaggcctgcattgaggccaagcacgacaagtacatggcggacatggacgagcttttttctcaggtggatgagaagaggaagaagcgagacatccccgactacctgtgtggcaagatcagctttgagctgatgcgggagccgtgcatcacgcccagtggcatcacctacgaccgcaaggacatcgaggagcacctgcagcgtgtgggtcattttgacccggtgaccaggagccccctgacccaggaacagctcatccccaacttggctatgaaggaggttattgacgcattcatctctgagaatggctgggtggaggactacggcagcggcagcccggcggcgaaacgcgtgaaactggattacccatacgatgttccagattacgcttaa

SEQ ID NO: 1688 - DNA, 753 bp, synthetic construct
  source 1..753: mol_type = other DNA; note = TCF4-(GS)3-CHIP-NLS-HA nucleic acid
atggatgacctaggcgccaacgacgaactgatttccttcaaagacgagggcgaacaggaggagaagagctccgaaaactcctcggcagagagggatttagctgatgtcaaatcgtctctagtcaatgaatcagaaacgggcagcggcagcggcagccggctgaacttcggggacgacatccccagcgctcttcgaatcgcgaagaagaagcgctggaacagcattgaggagcggcgcatccaccaggagagcgagctgcactcctacctctccaggctcattgccgcggagcgtgagagggagctggaagagtgccagcgaaaccacgagggtgatgaggacgacagccacgtccgggcccagcaggcctgcattgaggccaagcacgacaagtacatggcggacatggacgagcttttttctcaggtggatgagaagaggaagaagcgagacatccccgactacctgtgtggcaagatcagctttgagctgatgcgggagccgtgcatcacgcccagtggcatcacctacgaccgcaaggacatcgaggagcacctgcagcgtgtgggtcattttgacccggtgaccaggagccccctgacccaggaacagctcatccccaacttggctatgaaggaggttattgacgcattcatctctgagaatggctgggtggaggactacggcagcggcagcccggcggcgaaacgcgtgaaactggattacccatacgatgttccagattacgcttaa

SEQ ID NO: 1689 - DNA, 759 bp, synthetic construct
  source 1..759: mol_type = other DNA; note = TCF4-(GS)4-CHIP-NLS-HA nucleic acid
atggatgacctaggcgccaacgacgaactgatttccttcaaagacgagggcgaacaggaggagaagagctccgaaaactcctcggcagagagggatttagctgatgtcaaatcgtctctagtcaatgaatcagaaacgggcagcggcagcggcagcggcagccggctgaacttcggggacgacatccccagcgctcttcgaatcgcgaagaagaagcgctggaacagcattgaggagcggcgcatccaccaggagagcgagctgcactcctacctctccaggctcattgccgcggagcgtgagagggagctggaagagtgccagcgaaaccacgagggtgatgaggacgacagccacgtccgggcccagcaggcctgcattgaggccaagcacgacaagtacatggcggacatggacgagcttttttctcaggtggatgagaagaggaagaagcgagacatccccgactacctgtgtggcaagatcagctttgagctgatgcgggagccgtgcatcacgcccagtggcatcacctacgaccgcaaggacatcgaggagcacctgcagcgtgtgggtcattttgacccggtgaccaggagccccctgacccaggaacagctcatccccaacttggctatgaaggaggttattgacgcattcatctctgagaatggctgggtggaggactacggcagcggcagcccggcggcgaaacgcgtgaaactggattacccatacgatgttccagattacgcttaa

SEQ ID NO: 1690 - DNA, 765 bp, synthetic construct
  source 1..765: mol_type = other DNA; note = TCF4-(GS)5-CHIP-NLS-HA nucleic acid
atggatgacctaggcgccaacgacgaactgatttccttcaaagacgagggcgaacaggaggagaagagctccgaaaactcctcggcagagagggatttagctgatgtcaaatcgtctctagtcaatgaatcagaaacgggcagcggcagcggcagcggcagcggcagccggctgaacttcggggacgacatccccagcgctcttcgaatcgcgaagaagaagcgctggaacagcattgaggagcggcgcatccaccaggagagcgagctgcactcctacctctccaggctcattgccgcggagcgtgagagggagctggaagagtgccagcgaaaccacgagggtgatgaggacgacagccacgtccgggcccagcaggcctgcattgaggccaagcacgacaagtacatggcggacatggacgagcttttttctcaggtggatgagaagaggaagaagcgagacatccccgactacctgtgtggcaagatcagctttgagctgatgcgggagccgtgcatcacgcccagtggcatcacctacgaccgcaaggacatcgaggagcacctgcagcgtgtgggtcattttgacccggtgaccaggagccccctgacccaggaacagctcatccccaacttggctatgaaggaggttattgacgcattcatctctgagaatggctgggtggaggactacggcagcggcagcccggcggcgaaacgcgtgaaactggattacccatacgatgttccagattacgcttaa

SEQ ID NO: 1691 - DNA, 771 bp, synthetic construct
  source 1..771: mol_type = other DNA; note = TCF4-(GS)6-CHIP-NLS-HA nucleic acid
atggatgacctaggcgccaacgacgaactgatttccttcaaagacgagggcgaacaggaggagaagagctccgaaaactcctcggcagagagggatttagctgatgtcaaatcgtctctagtcaatgaatcagaaacgggcagcggcagcggcagcggcagcggcagcggcagccggctgaacttcggggacgacatccccagcgctcttcgaatcgcgaagaagaagcgctggaacagcattgaggagcggcgcatccaccaggagagcgagctgcactcctacctctccaggctcattgccgcggagcgtgagagggagctggaagagtgccagcgaaaccacgagggtgatgaggacgacagccacgtccgggcccagcaggcctgcattgaggccaagcacgacaagtacatggcggacatggacgagcttttttctcaggtggatgagaagaggaagaagcgagacatccccgactacctgtgtggcaagatcagctttgagctgatgcgggagccgtgcatcacgcccagtggcatcacctacgaccgcaaggacatcgaggagcacctgcagcgtgtgggtcattttgacccggtgaccaggagccccctgacccaggaacagctcatccccaacttggctatgaaggaggttattgacgcattcatctctgagaatggctgggtggaggactacggcagcggcagcccggcggcgaaacgcgtgaaactggattacccatacgatgttccagattacgcttaa

SEQ ID NO: 1692 - DNA, 294 bp, synthetic construct
  source 1..294: mol_type = other DNA; note = NLS-DCAF1-(GS)1-TCF4 nucleic acid
ccggcggcgaaacgcgtgaaactggatggcagcggcagcggcagccaggcgccgattaactttaccagccgcctgaaccgccgcgcgagctttccgaaatatggcggcgtggatggcggctgctttgatcgccatctgatttttagccgcggcagcgatgacctaggcgccaacgacgaactgatttccttcaaagacgagggcgaacaggaggagaagagctccgaaaactcctcggcagagagggatttagctgatgtcaaatcgtctctagtcaatgaatcagaaacgtaa

SEQ ID NO: 1693 - DNA, 300 bp, synthetic construct
  source 1..300: mol_type = other DNA; note = NLS-DCAF1-(GS)2-TCF4 nucleic acid
ccggcggcgaaacgcgtgaaactggatggcagcggcagcggcagccaggcgccgattaactttaccagccgcctgaaccgccgcgcgagctttccgaaatatggcggcgtggatggcggctgctttgatcgccatctgatttttagccgcggcagcggcagcgatgacctaggcgccaacgacgaactgatttccttcaaagacgagggcgaacaggaggagaagagctccgaaaactcctcggcagagagggatttagctgatgtcaaatcgtctctagtcaatgaatcagaaacgtaa

SEQ ID NO: 1694 - DNA, 306 bp, synthetic construct
  source 1..306: mol_type = other DNA; note = NLS-DCAF1-(GS)3-TCF4 nucleic acid
ccggcggcgaaacgcgtgaaactggatggcagcggcagcggcagccaggcgccgattaactttaccagccgcctgaaccgccgcgcgagctttccgaaatatggcggcgtggatggcggctgctttgatcgccatctgatttttagccgcggcagcggcagcggcagcgatgacctaggcgccaacgacgaactgatttccttcaaagacgagggcgaacaggaggagaagagctccgaaaactcctcggcagagagggatttagctgatgtcaaatcgtctctagtcaatgaatcagaaacgtaa

SEQ ID NO: 1695 - DNA, 312 bp, synthetic construct
  source 1..312: mol_type = other DNA; note = NLS-DCAF1-(GS)4-TCF4 nucleic acid
ccggcggcgaaacgcgtgaaactggatggcagcggcagcggcagccaggcgccgattaactttaccagccgcctgaaccgccgcgcgagctttccgaaatatggcggcgtggatggcggctgctttgatcgccatctgatttttagccgcggcagcggcagcggcagcggcagcgatgacctaggcgccaacgacgaactgatttccttcaaagacgagggcgaacaggaggagaagagctccgaaaactcctcggcagagagggatttagctgatgtcaaatcgtctctagtcaatgaatcagaaacgtaa

SEQ ID NO: 1696 - DNA, 318 bp, synthetic construct
  source 1..318: mol_type = other DNA; note = NLS-DCAF1-(GS)5-TCF4 nucleic acid
ccggcggcgaaacgcgtgaaactggatggcagcggcagcggcagccaggcgccgattaactttaccagccgcctgaaccgccgcgcgagctttccgaaatatggcggcgtggatggcggctgctttgatcgccatctgatttttagccgcggcagcggcagcggcagcggcagcggcagcgatgacctaggcgccaacgacgaactgatttccttcaaagacgagggcgaacaggaggagaagagctccgaaaactcctcggcagagagggatttagctgatgtcaaatcgtctctagtcaatgaatcagaaacgtaa

SEQ ID NO: 1697 - DNA, 324 bp, synthetic construct
  source 1..324: mol_type = other DNA; note = NLS-DCAF1-(GS)6-TCF4 nucleic acid
ccggcggcgaaacgcgtgaaactggatggcagcggcagcggcagccaggcgccgattaactttaccagccgcctgaaccgccgcgcgagctttccgaaatatggcggcgtggatggcggctgctttgatcgccatctgatttttagccgcggcagcggcagcggcagcggcagcggcagcggcagcgatgacctaggcgccaacgacgaactgatttccttcaaagacgagggcgaacaggaggagaagagctccgaaaactcctcggcagagagggatttagctgatgtcaaatcgtctctagtcaatgaatcagaaacgtaa

SEQ ID NO: 1698 - DNA, 324 bp, synthetic construct
  source 1..324: mol_type = other DNA; note = HA-NLS-DCAF1-(GS)1-TCF4 nucleic acid
atgtacccatacgatgttccagattacgctccggcggcgaaacgcgtgaaactggatggcagcggcagcggcagccaggcgccgattaactttaccagccgcctgaaccgccgcgcgagctttccgaaatatggcggcgtggatggcggctgctttgatcgccatctgatttttagccgcggcagcgatgacctaggcgccaacgacgaactgatttccttcaaagacgagggcgaacaggaggagaagagctccgaaaactcctcggcagagagggatttagctgatgtcaaatcgtctctagtcaatgaatcagaaacgtaa

SEQ ID NO: 1699 - DNA, 330 bp, synthetic construct
  source 1..330: mol_type = other DNA; note = HA-NLS-DCAF1-(GS)2-TCF4 nucleic acid
atgtacccatacgatgttccagattacgctccggcggcgaaacgcgtgaaactggatggcagcggcagcggcagccaggcgccgattaactttaccagccgcctgaaccgccgcgcgagctttccgaaatatggcggcgtggatggcggctgctttgatcgccatctgatttttagccgcggcagcggcagcgatgacctaggcgccaacgacgaactgatttccttcaaagacgagggcgaacaggaggagaagagctccgaaaactcctcggcagagagggatttagctgatgtcaaatcgtctctagtcaatgaatcagaaacgtaa

SEQ ID NO: 1700 - DNA, 336 bp, synthetic construct
  source 1..336: mol_type = other DNA; note = HA-NLS-DCAF1-(GS)3-TCF4 nucleic acid
atgtacccatacgatgttccagattacgctccggcggcgaaacgcgtgaaactggatggcagcggcagcggcagccaggcgccgattaactttaccagccgcctgaaccgccgcgcgagctttccgaaatatggcggcgtggatggcggctgctttgatcgccatctgatttttagccgcggcagcggcagcggcagcgatgacctaggcgccaacgacgaactgatttccttcaaagacgagggcgaacaggaggagaagagctccgaaaactcctcggcagagagggatttagctgatgtcaaatcgtctctagtcaatgaatcagaaacgtaa

SEQ ID NO: 1701 - DNA, 342 bp, synthetic construct
  source 1..342: mol_type = other DNA; note = HA-NLS-DCAF1-(GS)4-TCF4 nucleic acid
atgtacccatacgatgttccagattacgctccggcggcgaaacgcgtgaaactggatggcagcggcagcggcagccaggcgccgattaactttaccagccgcctgaaccgccgcgcgagctttccgaaatatggcggcgtggatggcggctgctttgatcgccatctgatttttagccgcggcagcggcagcggcagcggcagcgatgacctaggcgccaacgacgaactgatttccttcaaagacgagggcgaacaggaggagaagagctccgaaaactcctcggcagagagggatttagctgatgtcaaatcgtctctagtcaatgaatcagaaacgtaa

SEQ ID NO: 1702 - DNA, 348 bp, synthetic construct
  source 1..348: mol_type = other DNA; note = HA-NLS-DCAF1-(GS)5-TCF4 nucleic acid
atgtacccatacgatgttccagattacgctccggcggcgaaacgcgtgaaactggatggcagcggcagcggcagccaggcgccgattaactttaccagccgcctgaaccgccgcgcgagctttccgaaatatggcggcgtggatggcggctgctttgatcgccatctgatttttagccgcggcagcggcagcggcagcggcagcggcagcgatgacctaggcgccaacgacgaactgatttccttcaaagacgagggcgaacaggaggagaagagctccgaaaactcctcggcagagagggatttagctgatgtcaaatcgtctctagtcaatgaatcagaaacgtaa

SEQ ID NO: 1703 - DNA, 354 bp, synthetic construct
  source 1..354: mol_type = other DNA; note = HA-NLS-DCAF1-(GS)6-TCF4 nucleic acid
atgtacccatacgatgttccagattacgctccggcggcgaaacgcgtgaaactggatggcagcggcagcggcagccaggcgccgattaactttaccagccgcctgaaccgccgcgcgagctttccgaaatatggcggcgtggatggcggctgctttgatcgccatctgatttttagccgcggcagcggcagcggcagcggcagcggcagcggcagcgatgacctaggcgccaacgacgaactgatttccttcaaagacgagggcgaacaggaggagaagagctccgaaaactcctcggcagagagggatttagctgatgtcaaatcgtctctagtcaatgaatcagaaacgtaa

SEQ ID NO: 1704 - DNA, 1257 bp, synthetic construct
  source 1..1257: mol_type = other DNA; note = NLS-TCF4-(GS)1-E6AP nucleic acid
ccggcggcgaaacgcgtgaaactggatggcagcggcagcggcagcgatgacctaggcgccaacgacgaactgatttccttcaaagacgagggcgaacaggaggagaagagctccgaaaactcctcggcagagagggatttagctgatgtcaaatcgtctctagtcaatgaatcagaaacgggcagcaatccatatttgagactcaaagttagacgtgaccatatcatagatgatgcacttgtccggctagagatgatcgctatggaaaatcctgcagacttgaagaagcagttgtatgtggaatttgaaggagaacaaggagttgatgagggaggtgtttccaaagaattttttcagctggttgtggaggaaatcttcaatccagatattggtatgttcacatacgatgaatctacaaaattgttttggtttaatccatcttcttttgaaactgagggtcagtttactctgattggcatagtactgggtctggctatttacaataactgtatactggatgtacattttcccatggttgtctacaggaagctaatggggaaaaaaggaacttttcgtgacttgggagactctcacccagttctatatcagagtttaaaagatttattggagtatgaagggaatgtggaagatgacatgatgatcactttccagatatcacagacagatctttttggtaacccaatgatgtatgatctaaaggaaaatggtgataaaattccaattacaaatgaaaacaggaaggaatttgtcaatctttattctgactacattctcaataaatcagtagaaaaacagttcaaggcttttcggagaggttttcatatggtgaccaatgaatctcccttaaagtacttattcagaccagaagaaattgaattgcttatatgtggaagccggaatctagatttccaagcactagaagaaactacagaatatgacggtggctataccagggactctgttctgattagggagttctgggaaatcgttcattcatttacagatgaacagaaaagactcttcttgcagtttacaacgggcacagacagagcacctgtgggaggactaggaaaattaaagatgattatagccaaaaatggcccagacacagaaaggttacctacatctcatacttgctttaatgtgcttttacttccggaatactcaagcaaagaaaaacttaaagagagattgttgaaggccatcacgtatgccaaaggatttggcatgctgtaa

SEQ ID NO: 1705 - DNA, 1263 bp, synthetic construct
  source 1..1263: mol_type = other DNA; note = NLS-TCF4-(GS)2-E6AP nucleic acid
ccggcggcgaaacgcgtgaaactggatggcagcggcagcggcagcgatgacctaggcgccaacgacgaactgatttccttcaaagacgagggcgaacaggaggagaagagctccgaaaactcctcggcagagagggatttagctgatgtcaaatcgtctctagtcaatgaatcagaaacgggcagcggcagcaatccatatttgagactcaaagttagacgtgaccatatcatagatgatgcacttgtccggctagagatgatcgctatggaaaatcctgcagacttgaagaagcagttgtatgtggaatttgaaggagaacaaggagttgatgagggaggtgtttccaaagaattttttcagctggttgtggaggaaatcttcaatccagatattggtatgttcacatacgatgaatctacaaaattgttttggtttaatccatcttcttttgaaactgagggtcagtttactctgattggcatagtactgggtctggctatttacaataactgtatactggatgtacattttcccatggttgtctacaggaagctaatggggaaaaaaggaacttttcgtgacttgggagactctcacccagttctatatcagagtttaaaagatttattggagtatgaagggaatgtggaagatgacatgatgatcactttccagatatcacagacagatctttttggtaacccaatgatgtatgatctaaaggaaaatggtgataaaattccaattacaaatgaaaacaggaaggaatttgtcaatctttattctgactacattctcaataaatcagtagaaaaacagttcaaggcttttcggagaggttttcatatggtgaccaatgaatctcccttaaagtacttattcagaccagaagaaattgaattgcttatatgtggaagccggaatctagatttccaagcactagaagaaactacagaatatgacggtggctataccagggactctgttctgattagggagttctgggaaatcgttcattcatttacagatgaacagaaaagactcttcttgcagtttacaacgggcacagacagagcacctgtgggaggactaggaaaattaaagatgattatagccaaaaatggcccagacacagaaaggttacctacatctcatacttgctttaatgtgcttttacttccggaatactcaagcaaagaaaaacttaaagagagattgttgaaggccatcacgtatgccaaaggatttggcatgctgtaa

SEQ ID NO: 1706 - DNA, 1269 bp, synthetic construct
  source 1..1269: mol_type = other DNA; note = NLS-TCF4(GS)3-E6AP nucleic acid
ccggcggcgaaacgcgtgaaactggatggcagcggcagcggcagcgatgacctaggcgccaacgacgaactgatttccttcaaagacgagggcgaacaggaggagaagagctccgaaaactcctcggcagagagggatttagctgatgtcaaatcgtctctagtcaatgaatcagaaacgggcagcggcagcggcagcaatccatatttgagactcaaagttagacgtgaccatatcatagatgatgcacttgtccggctagagatgatcgctatggaaaatcctgcagacttgaagaagcagttgtatgtggaatttgaaggagaacaaggagttgatgagggaggtgtttccaaagaattttttcagctggttgtggaggaaatcttcaatccagatattggtatgttcacatacgatgaatctacaaaattgttttggtttaatccatcttcttttgaaactgagggtcagtttactctgattggcatagtactgggtctggctatttacaataactgtatactggatgtacattttcccatggttgtctacaggaagctaatggggaaaaaaggaacttttcgtgacttgggagactctcacccagttctatatcagagtttaaaagatttattggagtatgaagggaatgtggaagatgacatgatgatcactttccagatatcacagacagatctttttggtaacccaatgatgtatgatctaaaggaaaatggtgataaaattccaattacaaatgaaaacaggaaggaatttgtcaatctttattctgactacattctcaataaatcagtagaaaaacagttcaaggcttttcggagaggttttcatatggtgaccaatgaatctcccttaaagtacttattcagaccagaagaaattgaattgcttatatgtggaagccggaatctagatttccaagcactagaagaaactacagaatatgacggtggctataccagggactctgttctgattagggagttctgggaaatcgttcattcatttacagatgaacagaaaagactcttcttgcagtttacaacgggcacagacagagcacctgtgggaggactaggaaaattaaagatgattatagccaaaaatggcccagacacagaaaggttacctacatctcatacttgctttaatgtgcttttacttccggaatactcaagcaaagaaaaacttaaagagagattgttgaaggccatcacgtatgccaaaggatttggcatgctgtaa

SEQ ID NO: 1707 - DNA, 1275 bp, synthetic construct
  source 1..1275: mol_type = other DNA; note = NLS-TCF4-(GS)4-E6AP nucleic acid
ccggcggcgaaacgcgtgaaactggatggcagcggcagcggcagcgatgacctaggcgccaacgacgaactgatttccttcaaagacgagggcgaacaggaggagaagagctccgaaaactcctcggcagagagggatttagctgatgtcaaatcgtctctagtcaatgaatcagaaacgggcagcggcagcggcagcggcagcaatccatatttgagactcaaagttagacgtgaccatatcatagatgatgcacttgtccggctagagatgatcgctatggaaaatcctgcagacttgaagaagcagttgtatgtggaatttgaaggagaacaaggagttgatgagggaggtgtttccaaagaattttttcagctggttgtggaggaaatcttcaatccagatattggtatgttcacatacgatgaatctacaaaattgttttggtttaatccatcttcttttgaaactgagggtcagtttactctgattggcatagtactgggtctggctatttacaataactgtatactggatgtacattttcccatggttgtctacaggaagctaatggggaaaaaaggaacttttcgtgacttgggagactctcacccagttctatatcagagtttaaaagatttattggagtatgaagggaatgtggaagatgacatgatgatcactttccagatatcacagacagatctttttggtaacccaatgatgtatgatctaaaggaaaatggtgataaaattccaattacaaatgaaaacaggaaggaatttgtcaatctttattctgactacattctcaataaatcagtagaaaaacagttcaaggcttttcggagaggttttcatatggtgaccaatgaatctcccttaaagtacttattcagaccagaagaaattgaattgcttatatgtggaagccggaatctagatttccaagcactagaagaaactacagaatatgacggtggctataccagggactctgttctgattagggagttctgggaaatcgttcattcatttacagatgaacagaaaagactcttcttgcagtttacaacgggcacagacagagcacctgtgggaggactaggaaaattaaagatgattatagccaaaaatggcccagacacagaaaggttacctacatctcatacttgctttaatgtgcttttacttccggaatactcaagcaaagaaaaacttaaagagagattgttgaaggccatcacgtatgccaaaggatttggcatgctgtaa

SEQ ID NO: 1708 - DNA, 1281 bp, synthetic construct
  source 1..1281: mol_type = other DNA; note = NLS-TCF4-(GS)5-E6AP nucleic acid
ccggcggcgaaacgcgtgaaactggatggcagcggcagcggcagcgatgacctaggcgccaacgacgaactgatttccttcaaagacgagggcgaacaggaggagaagagctccgaaaactcctcggcagagagggatttagctgatgtcaaatcgtctctagtcaatgaatcagaaacgggcagcggcagcggcagcggcagcggcagcaatccatatttgagactcaaagttagacgtgaccatatcatagatgatgcacttgtccggctagagatgatcgctatggaaaatcctgcagacttgaagaagcagttgtatgtggaatttgaaggagaacaaggagttgatgagggaggtgtttccaaagaattttttcagctggttgtggaggaaatcttcaatccagatattggtatgttcacatacgatgaatctacaaaattgttttggtttaatccatcttcttttgaaactgagggtcagtttactctgattggcatagtactgggtctggctatttacaataactgtatactggatgtacattttcccatggttgtctacaggaagctaatggggaaaaaaggaacttttcgtgacttgggagactctcacccagttctatatcagagtttaaaagatttattggagtatgaagggaatgtggaagatgacatgatgatcactttccagatatcacagacagatctttttggtaacccaatgatgtatgatctaaaggaaaatggtgataaaattccaattacaaatgaaaacaggaaggaatttgtcaatctttattctgactacattctcaataaatcagtagaaaaacagttcaaggcttttcggagaggttttcatatggtgaccaatgaatctcccttaaagtacttattcagaccagaagaaattgaattgcttatatgtggaagccggaatctagatttccaagcactagaagaaactacagaatatgacggtggctataccagggactctgttctgattagggagttctgggaaatcgttcattcatttacagatgaacagaaaagactcttcttgcagtttacaacgggcacagacagagcacctgtgggaggactaggaaaattaaagatgattatagccaaaaatggcccagacacagaaaggttacctacatctcatacttgctttaatgtgcttttacttccggaatactcaagcaaagaaaaacttaaagagagattgttgaaggccatcacgtatgccaaaggatttggcatgctgtaa

SEQ ID NO: 1709 - DNA, 1287 bp, synthetic construct
  source 1..1287: mol_type = other DNA; note = NLS-TCF4-(GS)6-E6AP nucleic acid
ccggcggcgaaacgcgtgaaactggatggcagcggcagcggcagcgatgacctaggcgccaacgacgaactgatttccttcaaagacgagggcgaacaggaggagaagagctccgaaaactcctcggcagagagggatttagctgatgtcaaatcgtctctagtcaatgaatcagaaacgggcagcggcagcggcagcggcagcggcagcggcagcaatccatatttgagactcaaagttagacgtgaccatatcatagatgatgcacttgtccggctagagatgatcgctatggaaaatcctgcagacttgaagaagcagttgtatgtggaatttgaaggagaacaaggagttgatgagggaggtgtttccaaagaattttttcagctggttgtggaggaaatcttcaatccagatattggtatgttcacatacgatgaatctacaaaattgttttggtttaatccatcttcttttgaaactgagggtcagtttactctgattggcatagtactgggtctggctatttacaataactgtatactggatgtacattttcccatggttgtctacaggaagctaatggggaaaaaaggaacttttcgtgacttgggagactctcacccagttctatatcagagtttaaaagatttattggagtatgaagggaatgtggaagatgacatgatgatcactttccagatatcacagacagatctttttggtaacccaatgatgtatgatctaaaggaaaatggtgataaaattccaattacaaatgaaaacaggaaggaatttgtcaatctttattctgactacattctcaataaatcagtagaaaaacagttcaaggcttttcggagaggttttcatatggtgaccaatgaatctcccttaaagtacttattcagaccagaagaaattgaattgcttatatgtggaagccggaatctagatttccaagcactagaagaaactacagaatatgacggtggctataccagggactctgttctgattagggagttctgggaaatcgttcattcatttacagatgaacagaaaagactcttcttgcagtttacaacgggcacagacagagcacctgtgggaggactaggaaaattaaagatgattatagccaaaaatggcccagacacagaaaggttacctacatctcatacttgctttaatgtgcttttacttccggaatactcaagcaaagaaaaacttaaagagagattgttgaaggccatcacgtatgccaaaggatttggcatgctgtaa

SEQ ID NO: 1710 - DNA, 1287 bp, synthetic construct
  source 1..1287: mol_type = other DNA; note = HA-NLS-TCF4-(GS)1-E6AP nucleic acid
atgtacccatacgatgttccagattacgctccggcggcgaaacgcgtgaaactggatggcagcggcagcggcagcgatgacctaggcgccaacgacgaactgatttccttcaaagacgagggcgaacaggaggagaagagctccgaaaactcctcggcagagagggatttagctgatgtcaaatcgtctctagtcaatgaatcagaaacgggcagcaatccatatttgagactcaaagttagacgtgaccatatcatagatgatgcacttgtccggctagagatgatcgctatggaaaatcctgcagacttgaagaagcagttgtatgtggaatttgaaggagaacaaggagttgatgagggaggtgtttccaaagaattttttcagctggttgtggaggaaatcttcaatccagatattggtatgttcacatacgatgaatctacaaaattgttttggtttaatccatcttcttttgaaactgagggtcagtttactctgattggcatagtactgggtctggctatttacaataactgtatactggatgtacattttcccatggttgtctacaggaagctaatggggaaaaaaggaacttttcgtgacttgggagactctcacccagttctatatcagagtttaaaagatttattggagtatgaagggaatgtggaagatgacatgatgatcactttccagatatcacagacagatctttttggtaacccaatgatgtatgatctaaaggaaaatggtgataaaattccaattacaaatgaaaacaggaaggaatttgtcaatctttattctgactacattctcaataaatcagtagaaaaacagttcaaggcttttcggagaggttttcatatggtgaccaatgaatctcccttaaagtacttattcagaccagaagaaattgaattgcttatatgtggaagccggaatctagatttccaagcactagaagaaactacagaatatgacggtggctataccagggactctgttctgattagggagttctgggaaatcgttcattcatttacagatgaacagaaaagactcttcttgcagtttacaacgggcacagacagagcacctgtgggaggactaggaaaattaaagatgattatagccaaaaatggcccagacacagaaaggttacctacatctcatacttgctttaatgtgcttttacttccggaatactcaagcaaagaaaaacttaaagagagattgttgaaggccatcacgtatgccaaaggatttggcatgctgtaa

SEQ ID NO: 1711 - DNA, 1293 bp, synthetic construct
  source 1..1293: mol_type = other DNA; note = HA-NLS-TCF4-(GS)2-E6AP nucleic acid
atgtacccatacgatgttccagattacgctccggcggcgaaacgcgtgaaactggatggcagcggcagcggcagcgatgacctaggcgccaacgacgaactgatttccttcaaagacgagggcgaacaggaggagaagagctccgaaaactcctcggcagagagggatttagctgatgtcaaatcgtctctagtcaatgaatcagaaacgggcagcggcagcaatccatatttgagactcaaagttagacgtgaccatatcatagatgatgcacttgtccggctagagatgatcgctatggaaaatcctgcagacttgaagaagcagttgtatgtggaatttgaaggagaacaaggagttgatgagggaggtgtttccaaagaattttttcagctggttgtggaggaaatcttcaatccagatattggtatgttcacatacgatgaatctacaaaattgttttggtttaatccatcttcttttgaaactgagggtcagtttactctgattggcatagtactgggtctggctatttacaataactgtatactggatgtacattttcccatggttgtctacaggaagctaatggggaaaaaaggaacttttcgtgacttgggagactctcacccagttctatatcagagtttaaaagatttattggagtatgaagggaatgtggaagatgacatgatgatcactttccagatatcacagacagatctttttggtaacccaatgatgtatgatctaaaggaaaatggtgataaaattccaattacaaatgaaaacaggaaggaatttgtcaatctttattctgactacattctcaataaatcagtagaaaaacagttcaaggcttttcggagaggttttcatatggtgaccaatgaatctcccttaaagtacttattcagaccagaagaaattgaattgcttatatgtggaagccggaatctagatttccaagcactagaagaaactacagaatatgacggtggctataccagggactctgttctgattagggagttctgggaaatcgttcattcatttacagatgaacagaaaagactcttcttgcagtttacaacgggcacagacagagcacctgtgggaggactaggaaaattaaagatgattatagccaaaaatggcccagacacagaaaggttacctacatctcatacttgctttaatgtgcttttacttccggaatactcaagcaaagaaaaacttaaagagagattgttgaaggccatcacgtatgccaaaggatttggcatgctgtaa

SEQ ID NO: 1712 - DNA, 1299 bp, synthetic construct
  source 1..1299: mol_type = other DNA; note = HA-NLS-TCF4(GS)3-E6AP nucleic acid
atgtacccatacgatgttccagattacgctccggcggcgaaacgcgtgaaactggatggcagcggcagcggcagcgatgacctaggcgccaacgacgaactgatttccttcaaagacgagggcgaacaggaggagaagagctccgaaaactcctcggcagagagggatttagctgatgtcaaatcgtctctagtcaatgaatcagaaacgggcagcggcagcggcagcaatccatatttgagactcaaagttagacgtgaccatatcatagatgatgcacttgtccggctagagatgatcgctatggaaaatcctgcagacttgaagaagcagttgtatgtggaatttgaaggagaacaaggagttgatgagggaggtgtttccaaagaattttttcagctggttgtggaggaaatcttcaatccagatattggtatgttcacatacgatgaatctacaaaattgttttggtttaatccatcttcttttgaaactgagggtcagtttactctgattggcatagtactgggtctggctatttacaataactgtatactggatgtacattttcccatggttgtctacaggaagctaatggggaaaaaaggaacttttcgtgacttgggagactctcacccagttctatatcagagtttaaaagatttattggagtatgaagggaatgtggaagatgacatgatgatcactttccagatatcacagacagatctttttggtaacccaatgatgtatgatctaaaggaaaatggtgataaaattccaattacaaatgaaaacaggaaggaatttgtcaatctttattctgactacattctcaataaatcagtagaaaaacagttcaaggcttttcggagaggttttcatatggtgaccaatgaatctcccttaaagtacttattcagaccagaagaaattgaattgcttatatgtggaagccggaatctagatttccaagcactagaagaaactacagaatatgacggtggctataccagggactctgttctgattagggagttctgggaaatcgttcattcatttacagatgaacagaaaagactcttcttgcagtttacaacgggcacagacagagcacctgtgggaggactaggaaaattaaagatgattatagccaaaaatggcccagacacagaaaggttacctacatctcatacttgctttaatgtgcttttacttccggaatactcaagcaaagaaaaacttaaagagagattgttgaaggccatcacgtatgccaaaggatttggcatgctgtaa

SEQ ID NO: 1713 - DNA, 1305 bp, synthetic construct
  source 1..1305: mol_type = other DNA; note = HA-NLS-TCF4-(GS)4-E6AP nucleic acid
atgtacccatacgatgttccagattacgctccggcggcgaaacgcgtgaaactggatggcagcggcagcggcagcgatgacctaggcgccaacgacgaactgatttccttcaaagacgagggcgaacaggaggagaagagctccgaaaactcctcggcagagagggatttagctgatgtcaaatcgtctctagtcaatgaatcagaaacgggcagcggcagcggcagcggcagcaatccatatttgagactcaaagttagacgtgaccatatcatagatgatgcacttgtccggctagagatgatcgctatggaaaatcctgcagacttgaagaagcagttgtatgtggaatttgaaggagaacaaggagttgatgagggaggtgtttccaaagaattttttcagctggttgtggaggaaatcttcaatccagatattggtatgttcacatacgatgaatctacaaaattgttttggtttaatccatcttcttttgaaactgagggtcagtttactctgattggcatagtactgggtctggctatttacaataactgtatactggatgtacattttcccatggttgtctacaggaagctaatggggaaaaaaggaacttttcgtgacttgggagactctcacccagttctatatcagagtttaaaagatttattggagtatgaagggaatgtggaagatgacatgatgatcactttccagatatcacagacagatctttttggtaacccaatgatgtatgatctaaaggaaaatggtgataaaattccaattacaaatgaaaacaggaaggaatttgtcaatctttattctgactacattctcaataaatcagtagaaaaacagttcaaggcttttcggagaggttttcatatggtgaccaatgaatctcccttaaagtacttattcagaccagaagaaattgaattgcttatatgtggaagccggaatctagatttccaagcactagaagaaactacagaatatgacggtggctataccagggactctgttctgattagggagttctgggaaatcgttcattcatttacagatgaacagaaaagactcttcttgcagtttacaacgggcacagacagagcacctgtgggaggactaggaaaattaaagatgattatagccaaaaatggcccagacacagaaaggttacctacatctcatacttgctttaatgtgcttttacttccggaatactcaagcaaagaaaaacttaaagagagattgttgaaggccatcacgtatgccaaaggatttggcatgctgtaa

SEQ ID NO: 1714 - DNA, 1311 bp, synthetic construct
  source 1..1311: mol_type = other DNA; note = HA-NLS-TCF4-(GS)5-E6AP nucleic acid
atgtacccatacgatgttccagattacgctccggcggcgaaacgcgtgaaactggatggcagcggcagcggcagcgatgacctaggcgccaacgacgaactgatttccttcaaagacgagggcgaacaggaggagaagagctccgaaaactcctcggcagagagggatttagctgatgtcaaatcgtctctagtcaatgaatcagaaacgggcagcggcagcggcagcggcagcggcagcaatccatatttgagactcaaagttagacgtgaccatatcatagatgatgcacttgtccggctagagatgatcgctatggaaaatcctgcagacttgaagaagcagttgtatgtggaatttgaaggagaacaaggagttgatgagggaggtgtttccaaagaattttttcagctggttgtggaggaaatcttcaatccagatattggtatgttcacatacgatgaatctacaaaattgttttggtttaatccatcttcttttgaaactgagggtcagtttactctgattggcatagtactgggtctggctatttacaataactgtatactggatgtacattttcccatggttgtctacaggaagctaatggggaaaaaaggaacttttcgtgacttgggagactctcacccagttctatatcagagtttaaaagatttattggagtatgaagggaatgtggaagatgacatgatgatcactttccagatatcacagacagatctttttggtaacccaatgatgtatgatctaaaggaaaatggtgataaaattccaattacaaatgaaaacaggaaggaatttgtcaatctttattctgactacattctcaataaatcagtagaaaaacagttcaaggcttttcggagaggttttcatatggtgaccaatgaatctcccttaaagtacttattcagaccagaagaaattgaattgcttatatgtggaagccggaatctagatttccaagcactagaagaaactacagaatatgacggtggctataccagggactctgttctgattagggagttctgggaaatcgttcattcatttacagatgaacagaaaagactcttcttgcagtttacaacgggcacagacagagcacctgtgggaggactaggaaaattaaagatgattatagccaaaaatggcccagacacagaaaggttacctacatctcatacttgctttaatgtgcttttacttccggaatactcaagcaaagaaaaacttaaagagagattgttgaaggccatcacgtatgccaaaggatttggcatgctgtaa

SEQ ID NO: 1715 - DNA, 1317 bp, synthetic construct
  source 1..1317: mol_type = other DNA; note = HA-NLS-TCF4-(GS)6-E6AP nucleic acid
atgtacccatacgatgttccagattacgctccggcggcgaaacgcgtgaaactggatggcagcggcagcggcagcgatgacctaggcgccaacgacgaactgatttccttcaaagacgagggcgaacaggaggagaagagctccgaaaactcctcggcagagagggatttagctgatgtcaaatcgtctctagtcaatgaatcagaaacgggcagcggcagcggcagcggcagcggcagcggcagcaatccatatttgagactcaaagttagacgtgaccatatcatagatgatgcacttgtccggctagagatgatcgctatggaaaatcctgcagacttgaagaagcagttgtatgtggaatttgaaggagaacaaggagttgatgagggaggtgtttccaaagaattttttcagctggttgtggaggaaatcttcaatccagatattggtatgttcacatacgatgaatctacaaaattgttttggtttaatccatcttcttttgaaactgagggtcagtttactctgattggcatagtactgggtctggctatttacaataactgtatactggatgtacattttcccatggttgtctacaggaagctaatggggaaaaaaggaacttttcgtgacttgggagactctcacccagttctatatcagagtttaaaagatttattggagtatgaagggaatgtggaagatgacatgatgatcactttccagatatcacagacagatctttttggtaacccaatgatgtatgatctaaaggaaaatggtgataaaattccaattacaaatgaaaacaggaaggaatttgtcaatctttattctgactacattctcaataaatcagtagaaaaacagttcaaggcttttcggagaggttttcatatggtgaccaatgaatctcccttaaagtacttattcagaccagaagaaattgaattgcttatatgtggaagccggaatctagatttccaagcactagaagaaactacagaatatgacggtggctataccagggactctgttctgattagggagttctgggaaatcgttcattcatttacagatgaacagaaaagactcttcttgcagtttacaacgggcacagacagagcacctgtgggaggactaggaaaattaaagatgattatagccaaaaatggcccagacacagaaaggttacctacatctcatacttgctttaatgtgcttttacttccggaatactcaagcaaagaaaaacttaaagagagattgttgaaggccatcacgtatgccaaaggatttggcatgctgtaa

SEQ ID NO: 1716 - DNA, 1245 bp, synthetic construct
  source 1..1245: mol_type = other DNA; note = FBXW7a-(GS)1-TCF4 nucleic acid
aatcaggaactgctctctgtgggcagcaaaagacgacgaactggaggctctctgagaggtaacccttcctcaagccaggtagatgaagaacagatgaatcgtgtggtagaggaggaacagcaacagcaactcagacaacaagaggaggagcacactgcaaggaatggtgaagttgttggagtagaacctagacctggaggccaaaatgattcccagcaaggacagttggaagaaaacaataatagatttatttcggtagatgaggactcctcaggaaaccaagaagaacaagaggaagatgaagaacatgctggtgaacaagatgaggaggatgaggaggaggaggagatggaccaggagagtgacgattttgatcagtctgatgatagtagcagagaagatgaacatacacatactaacagtgtcacgaactccagtagtattgtggacctgcccgttcaccaactctcctccccattctatacaaaaacaacaaaaatgaaaagaaagttggaccatggttctgaggtccgctctttttctttgggaaagaaaccatgcaaagtctcagaatatacaagtaccactgggcttgtaccatgttcagcaacaccaacaacttttggggacctcagagcagccaatggccaagggcaacaacgacgccgaattacatctgtccagccacctacaggcctccaggaatggctaaaaatgtttcagagctggagtggaccagagaaattgcttgctttagatgaactcattgatagttgtgaaccaacacaagtaaaacatatgatgcaagtgatagaaccccagtttcaacgagacttcatttcattgctccctaaagagttggcactctatgtgctttcattcctggaacccaaagacctgctacaagcagctcagacatgtcgctactggagaattttggctgaagacaaccttctctggagagagaaatgcaaagaagaggggattgatgaaccattgcacatcaagagaagaaaagtaataaaaccaggtttcatacacagtccatggaaaagtgcatacatcagacagcacagaattgatactaactcgaggcgaggaggcagcgatgacctaggcgccaacgacgaactgatttccttcaaagacgagggcgaacaggaggagaagagctccgaaaactcctcggcagagagggatttagctgatgtcaaatcgtctctagtcaatgaatcagaaacgtaa

SEQ ID NO: 1717 - DNA, 1251 bp, synthetic construct
  source 1..1251: mol_type = other DNA; note = FBXW7a-(GS)2-TCF4 nucleic acid
aatcaggaactgctctctgtgggcagcaaaagacgacgaactggaggctctctgagaggtaacccttcctcaagccaggtagatgaagaacagatgaatcgtgtggtagaggaggaacagcaacagcaactcagacaacaagaggaggagcacactgcaaggaatggtgaagttgttggagtagaacctagacctggaggccaaaatgattcccagcaaggacagttggaagaaaacaataatagatttatttcggtagatgaggactcctcaggaaaccaagaagaacaagaggaagatgaagaacatgctggtgaacaagatgaggaggatgaggaggaggaggagatggaccaggagagtgacgattttgatcagtctgatgatagtagcagagaagatgaacatacacatactaacagtgtcacgaactccagtagtattgtggacctgcccgttcaccaactctcctccccattctatacaaaaacaacaaaaatgaaaagaaagttggaccatggttctgaggtccgctctttttctttgggaaagaaaccatgcaaagtctcagaatatacaagtaccactgggcttgtaccatgttcagcaacaccaacaacttttggggacctcagagcagccaatggccaagggcaacaacgacgccgaattacatctgtccagccacctacaggcctccaggaatggctaaaaatgtttcagagctggagtggaccagagaaattgcttgctttagatgaactcattgatagttgtgaaccaacacaagtaaaacatatgatgcaagtgatagaaccccagtttcaacgagacttcatttcattgctccctaaagagttggcactctatgtgctttcattcctggaacccaaagacctgctacaagcagctcagacatgtcgctactggagaattttggctgaagacaaccttctctggagagagaaatgcaaagaagaggggattgatgaaccattgcacatcaagagaagaaaagtaataaaaccaggtttcatacacagtccatggaaaagtgcatacatcagacagcacagaattgatactaactcgaggcgaggaggcagcggcagcgatgacctaggcgccaacgacgaactgatttccttcaaagacgagggcgaacaggaggagaagagctccgaaaactcctcggcagagagggatttagctgatgtcaaatcgtctctagtcaatgaatcagaaacgtaa

SEQ ID NO: 1718 - DNA, 1257 bp, synthetic construct
  source 1..1257: mol_type = other DNA; note = FBXW7a-(GS)3-TCF4 nucleic acid
aatcaggaactgctctctgtgggcagcaaaagacgacgaactggaggctctctgagaggtaacccttcctcaagccaggtagatgaagaacagatgaatcgtgtggtagaggaggaacagcaacagcaactcagacaacaagaggaggagcacactgcaaggaatggtgaagttgttggagtagaacctagacctggaggccaaaatgattcccagcaaggacagttggaagaaaacaataatagatttatttcggtagatgaggactcctcaggaaaccaagaagaacaagaggaagatgaagaacatgctggtgaacaagatgaggaggatgaggaggaggaggagatggaccaggagagtgacgattttgatcagtctgatgatagtagcagagaagatgaacatacacatactaacagtgtcacgaactccagtagtattgtggacctgcccgttcaccaactctcctccccattctatacaaaaacaacaaaaatgaaaagaaagttggaccatggttctgaggtccgctctttttctttgggaaagaaaccatgcaaagtctcagaatatacaagtaccactgggcttgtaccatgttcagcaacaccaacaacttttggggacctcagagcagccaatggccaagggcaacaacgacgccgaattacatctgtccagccacctacaggcctccaggaatggctaaaaatgtttcagagctggagtggaccagagaaattgcttgctttagatgaactcattgatagttgtgaaccaacacaagtaaaacatatgatgcaagtgatagaaccccagtttcaacgagacttcatttcattgctccctaaagagttggcactctatgtgctttcattcctggaacccaaagacctgctacaagcagctcagacatgtcgctactggagaattttggctgaagacaaccttctctggagagagaaatgcaaagaagaggggattgatgaaccattgcacatcaagagaagaaaagtaataaaaccaggtttcatacacagtccatggaaaagtgcatacatcagacagcacagaattgatactaactcgaggcgaggaggcagcggcagcggcagcgatgacctaggcgccaacgacgaactgatttccttcaaagacgagggcgaacaggaggagaagagctccgaaaactcctcggcagagagggatttagctgatgtcaaatcgtctctagtcaatgaatcagaaacgtaa

SEQ ID NO: 1719 - DNA, 1263 bp, synthetic construct
  source 1..1263: mol_type = other DNA; note = FBXW7a-(GS)4-TCF4 nucleic acid
aatcaggaactgctctctgtgggcagcaaaagacgacgaactggaggctctctgagaggtaacccttcctcaagccaggtagatgaagaacagatgaatcgtgtggtagaggaggaacagcaacagcaactcagacaacaagaggaggagcacactgcaaggaatggtgaagttgttggagtagaacctagacctggaggccaaaatgattcccagcaaggacagttggaagaaaacaataatagatttatttcggtagatgaggactcctcaggaaaccaagaagaacaagaggaagatgaagaacatgctggtgaacaagatgaggaggatgaggaggaggaggagatggaccaggagagtgacgattttgatcagtctgatgatagtagcagagaagatgaacatacacatactaacagtgtcacgaactccagtagtattgtggacctgcccgttcaccaactctcctccccattctatacaaaaacaacaaaaatgaaaagaaagttggaccatggttctgaggtccgctctttttctttgggaaagaaaccatgcaaagtctcagaatatacaagtaccactgggcttgtaccatgttcagcaacaccaacaacttttggggacctcagagcagccaatggccaagggcaacaacgacgccgaattacatctgtccagccacctacaggcctccaggaatggctaaaaatgtttcagagctggagtggaccagagaaattgcttgctttagatgaactcattgatagttgtgaaccaacacaagtaaaacatatgatgcaagtgatagaaccccagtttcaacgagacttcatttcattgctccctaaagagttggcactctatgtgctttcattcctggaacccaaagacctgctacaagcagctcagacatgtcgctactggagaattttggctgaagacaaccttctctggagagagaaatgcaaagaagaggggattgatgaaccattgcacatcaagagaagaaaagtaataaaaccaggtttcatacacagtccatggaaaagtgcatacatcagacagcacagaattgatactaactcgaggcgaggaggcagcggcagcggcagcggcagcgatgacctaggcgccaacgacgaactgatttccttcaaagacgagggcgaacaggaggagaagagctccgaaaactcctcggcagagagggatttagctgatgtcaaatcgtctctagtcaatgaatcagaaacgtaa

SEQ ID NO: 1720 - DNA, 1269 bp, synthetic construct
  source 1..1269: mol_type = other DNA; note = FBXW7a-(GS)5-TCF4 nucleic acid
aatcaggaactgctctctgtgggcagcaaaagacgacgaactggaggctctctgagaggtaacccttcctcaagccaggtagatgaagaacagatgaatcgtgtggtagaggaggaacagcaacagcaactcagacaacaagaggaggagcacactgcaaggaatggtgaagttgttggagtagaacctagacctggaggccaaaatgattcccagcaaggacagttggaagaaaacaataatagatttatttcggtagatgaggactcctcaggaaaccaagaagaacaagaggaagatgaagaacatgctggtgaacaagatgaggaggatgaggaggaggaggagatggaccaggagagtgacgattttgatcagtctgatgatagtagcagagaagatgaacatacacatactaacagtgtcacgaactccagtagtattgtggacctgcccgttcaccaactctcctccccattctatacaaaaacaacaaaaatgaaaagaaagttggaccatggttctgaggtccgctctttttctttgggaaagaaaccatgcaaagtctcagaatatacaagtaccactgggcttgtaccatgttcagcaacaccaacaacttttggggacctcagagcagccaatggccaagggcaacaacgacgccgaattacatctgtccagccacctacaggcctccaggaatggctaaaaatgtttcagagctggagtggaccagagaaattgcttgctttagatgaactcattgatagttgtgaaccaacacaagtaaaacatatgatgcaagtgatagaaccccagtttcaacgagacttcatttcattgctccctaaagagttggcactctatgtgctttcattcctggaacccaaagacctgctacaagcagctcagacatgtcgctactggagaattttggctgaagacaaccttctctggagagagaaatgcaaagaagaggggattgatgaaccattgcacatcaagagaagaaaagtaataaaaccaggtttcatacacagtccatggaaaagtgcatacatcagacagcacagaattgatactaactcgaggcgaggaggcagcggcagcggcagcggcagcggcagcgatgacctaggcgccaacgacgaactgatttccttcaaagacgagggcgaacaggaggagaagagctccgaaaactcctcggcagagagggatttagctgatgtcaaatcgtctctagtcaatgaatcagaaacgtaa

SEQ ID NO: 1721 - DNA, 1275 bp, synthetic construct
  source 1..1275: mol_type = other DNA; note = FBXW7a-(GS)6-TCF4 nucleic acid
aatcaggaactgctctctgtgggcagcaaaagacgacgaactggaggctctctgagaggtaacccttcctcaagccaggtagatgaagaacagatgaatcgtgtggtagaggaggaacagcaacagcaactcagacaacaagaggaggagcacactgcaaggaatggtgaagttgttggagtagaacctagacctggaggccaaaatgattcccagcaaggacagttggaagaaaacaataatagatttatttcggtagatgaggactcctcaggaaaccaagaagaacaagaggaagatgaagaacatgctggtgaacaagatgaggaggatgaggaggaggaggagatggaccaggagagtgacgattttgatcagtctgatgatagtagcagagaagatgaacatacacatactaacagtgtcacgaactccagtagtattgtggacctgcccgttcaccaactctcctccccattctatacaaaaacaacaaaaatgaaaagaaagttggaccatggttctgaggtccgctctttttctttgggaaagaaaccatgcaaagtctcagaatatacaagtaccactgggcttgtaccatgttcagcaacaccaacaacttttggggacctcagagcagccaatggccaagggcaacaacgacgccgaattacatctgtccagccacctacaggcctccaggaatggctaaaaatgtttcagagctggagtggaccagagaaattgcttgctttagatgaactcattgatagttgtgaaccaacacaagtaaaacatatgatgcaagtgatagaaccccagtttcaacgagacttcatttcattgctccctaaagagttggcactctatgtgctttcattcctggaacccaaagacctgctacaagcagctcagacatgtcgctactggagaattttggctgaagacaaccttctctggagagagaaatgcaaagaagaggggattgatgaaccattgcacatcaagagaagaaaagtaataaaaccaggtttcatacacagtccatggaaaagtgcatacatcagacagcacagaattgatactaactcgaggcgaggaggcagcggcagcggcagcggcagcggcagcggcagcgatgacctaggcgccaacgacgaactgatttccttcaaagacgagggcgaacaggaggagaagagctccgaaaactcctcggcagagagggatttagctgatgtcaaatcgtctctagtcaatgaatcagaaacgtaa

SEQ ID NO: 1722 - DNA, 1275 bp, synthetic construct
  source 1..1275: mol_type = other DNA; note = HA-FBXW7a-(GS)1-TCF4 nucleic acid
atgtacccatacgatgttccagattacgctaatcaggaactgctctctgtgggcagcaaaagacgacgaactggaggctctctgagaggtaacccttcctcaagccaggtagatgaagaacagatgaatcgtgtggtagaggaggaacagcaacagcaactcagacaacaagaggaggagcacactgcaaggaatggtgaagttgttggagtagaacctagacctggaggccaaaatgattcccagcaaggacagttggaagaaaacaataatagatttatttcggtagatgaggactcctcaggaaaccaagaagaacaagaggaagatgaagaacatgctggtgaacaagatgaggaggatgaggaggaggaggagatggaccaggagagtgacgattttgatcagtctgatgatagtagcagagaagatgaacatacacatactaacagtgtcacgaactccagtagtattgtggacctgcccgttcaccaactctcctccccattctatacaaaaacaacaaaaatgaaaagaaagttggaccatggttctgaggtccgctctttttctttgggaaagaaaccatgcaaagtctcagaatatacaagtaccactgggcttgtaccatgttcagcaacaccaacaacttttggggacctcagagcagccaatggccaagggcaacaacgacgccgaattacatctgtccagccacctacaggcctccaggaatggctaaaaatgtttcagagctggagtggaccagagaaattgcttgctttagatgaactcattgatagttgtgaaccaacacaagtaaaacatatgatgcaagtgatagaaccccagtttcaacgagacttcatttcattgctccctaaagagttggcactctatgtgctttcattcctggaacccaaagacctgctacaagcagctcagacatgtcgctactggagaattttggctgaagacaaccttctctggagagagaaatgcaaagaagaggggattgatgaaccattgcacatcaagagaagaaaagtaataaaaccaggtttcatacacagtccatggaaaagtgcatacatcagacagcacagaattgatactaactcgaggcgaggaggcagcgatgacctaggcgccaacgacgaactgatttccttcaaagacgagggcgaacaggaggagaagagctccgaaaactcctcggcagagagggatttagctgatgtcaaatcgtctctagtcaatgaatcagaaacgtaa

SEQ ID NO: 1723 - DNA, 1281 bp, synthetic construct
  source 1..1281: mol_type = other DNA; note = HA-FBXW7a-(GS)2-TCF4 nucleic acid
atgtacccatacgatgttccagattacgctaatcaggaactgctctctgtgggcagcaaaagacgacgaactggaggctctctgagaggtaacccttcctcaagccaggtagatgaagaacagatgaatcgtgtggtagaggaggaacagcaacagcaactcagacaacaagaggaggagcacactgcaaggaatggtgaagttgttggagtagaacctagacctggaggccaaaatgattcccagcaaggacagttggaagaaaacaataatagatttatttcggtagatgaggactcctcaggaaaccaagaagaacaagaggaagatgaagaacatgctggtgaacaagatgaggaggatgaggaggaggaggagatggaccaggagagtgacgattttgatcagtctgatgatagtagcagagaagatgaacatacacatactaacagtgtcacgaactccagtagtattgtggacctgcccgttcaccaactctcctccccattctatacaaaaacaacaaaaatgaaaagaaagttggaccatggttctgaggtccgctctttttctttgggaaagaaaccatgcaaagtctcagaatatacaagtaccactgggcttgtaccatgttcagcaacaccaacaacttttggggacctcagagcagccaatggccaagggcaacaacgacgccgaattacatctgtccagccacctacaggcctccaggaatggctaaaaatgtttcagagctggagtggaccagagaaattgcttgctttagatgaactcattgatagttgtgaaccaacacaagtaaaacatatgatgcaagtgatagaaccccagtttcaacgagacttcatttcattgctccctaaagagttggcactctatgtgctttcattcctggaacccaaagacctgctacaagcagctcagacatgtcgctactggagaattttggctgaagacaaccttctctggagagagaaatgcaaagaagaggggattgatgaaccattgcacatcaagagaagaaaagtaataaaaccaggtttcatacacagtccatggaaaagtgcatacatcagacagcacagaattgatactaactcgaggcgaggaggcagcggcagcgatgacctaggcgccaacgacgaactgatttccttcaaagacgagggcgaacaggaggagaagagctccgaaaactcctcggcagagagggatttagctgatgtcaaatcgtctctagtcaatgaatcagaaacgtaa

SEQ ID NO: 1724 - DNA, 1287 bp, synthetic construct
  source 1..1287: mol_type = other DNA; note = HA-FBXW7a-(GS)3-TCF4 nucleic acid
atgtacccatacgatgttccagattacgctaatcaggaactgctctctgtgggcagcaaaagacgacgaactggaggctctctgagaggtaacccttcctcaagccaggtagatgaagaacagatgaatcgtgtggtagaggaggaacagcaacagcaactcagacaacaagaggaggagcacactgcaaggaatggtgaagttgttggagtagaacctagacctggaggccaaaatgattcccagcaaggacagttggaagaaaacaataatagatttatttcggtagatgaggactcctcaggaaaccaagaagaacaagaggaagatgaagaacatgctggtgaacaagatgaggaggatgaggaggaggaggagatggaccaggagagtgacgattttgatcagtctgatgatagtagcagagaagatgaacatacacatactaacagtgtcacgaactccagtagtattgtggacctgcccgttcaccaactctcctccccattctatacaaaaacaacaaaaatgaaaagaaagttggaccatggttctgaggtccgctctttttctttgggaaagaaaccatgcaaagtctcagaatatacaagtaccactgggcttgtaccatgttcagcaacaccaacaacttttggggacctcagagcagccaatggccaagggcaacaacgacgccgaattacatctgtccagccacctacaggcctccaggaatggctaaaaatgtttcagagctggagtggaccagagaaattgcttgctttagatgaactcattgatagttgtgaaccaacacaagtaaaacatatgatgcaagtgatagaaccccagtttcaacgagacttcatttcattgctccctaaagagttggcactctatgtgctttcattcctggaacccaaagacctgctacaagcagctcagacatgtcgctactggagaattttggctgaagacaaccttctctggagagagaaatgcaaagaagaggggattgatgaaccattgcacatcaagagaagaaaagtaataaaaccaggtttcatacacagtccatggaaaagtgcatacatcagacagcacagaattgatactaactcgaggcgaggaggcagcggcagcggcagcgatgacctaggcgccaacgacgaactgatttccttcaaagacgagggcgaacaggaggagaagagctccgaaaactcctcggcagagagggatttagctgatgtcaaatcgtctctagtcaatgaatcagaaacgtaa

SEQ ID NO: 1725 - DNA, 1293 bp, synthetic construct
  source 1..1293: mol_type = other DNA; note = HA-FBXW7a-(GS)4-TCF4 nucleic acid
atgtacccatacgatgttccagattacgctaatcaggaactgctctctgtgggcagcaaaagacgacgaactggaggctctctgagaggtaacccttcctcaagccaggtagatgaagaacagatgaatcgtgtggtagaggaggaacagcaacagcaactcagacaacaagaggaggagcacactgcaaggaatggtgaagttgttggagtagaacctagacctggaggccaaaatgattcccagcaaggacagttggaagaaaacaataatagatttatttcggtagatgaggactcctcaggaaaccaagaagaacaagaggaagatgaagaacatgctggtgaacaagatgaggaggatgaggaggaggaggagatggaccaggagagtgacgattttgatcagtctgatgatagtagcagagaagatgaacatacacatactaacagtgtcacgaactccagtagtattgtggacctgcccgttcaccaactctcctccccattctatacaaaaacaacaaaaatgaaaagaaagttggaccatggttctgaggtccgctctttttctttgggaaagaaaccatgcaaagtctcagaatatacaagtaccactgggcttgtaccatgttcagcaacaccaacaacttttggggacctcagagcagccaatggccaagggcaacaacgacgccgaattacatctgtccagccacctacaggcctccaggaatggctaaaaatgtttcagagctggagtggaccagagaaattgcttgctttagatgaactcattgatagttgtgaaccaacacaagtaaaacatatgatgcaagtgatagaaccccagtttcaacgagacttcatttcattgctccctaaagagttggcactctatgtgctttcattcctggaacccaaagacctgctacaagcagctcagacatgtcgctactggagaattttggctgaagacaaccttctctggagagagaaatgcaaagaagaggggattgatgaaccattgcacatcaagagaagaaaagtaataaaaccaggtttcatacacagtccatggaaaagtgcatacatcagacagcacagaattgatactaactcgaggcgaggaggcagcggcagcggcagcggcagcgatgacctaggcgccaacgacgaactgatttccttcaaagacgagggcgaacaggaggagaagagctccgaaaactcctcggcagagagggatttagctgatgtcaaatcgtctctagtcaatgaatcagaaacgtaa

SEQ ID NO: 1726 - DNA, 1299 bp, synthetic construct
  source 1..1299: mol_type = other DNA; note = HA-FBXW7a-(GS)5-TCF4 nucleic acid
atgtacccatacgatgttccagattacgctaatcaggaactgctctctgtgggcagcaaaagacgacgaactggaggctctctgagaggtaacccttcctcaagccaggtagatgaagaacagatgaatcgtgtggtagaggaggaacagcaacagcaactcagacaacaagaggaggagcacactgcaaggaatggtgaagttgttggagtagaacctagacctggaggccaaaatgattcccagcaaggacagttggaagaaaacaataatagatttatttcggtagatgaggactcctcaggaaaccaagaagaacaagaggaagatgaagaacatgctggtgaacaagatgaggaggatgaggaggaggaggagatggaccaggagagtgacgattttgatcagtctgatgatagtagcagagaagatgaacatacacatactaacagtgtcacgaactccagtagtattgtggacctgcccgttcaccaactctcctccccattctatacaaaaacaacaaaaatgaaaagaaagttggaccatggttctgaggtccgctctttttctttgggaaagaaaccatgcaaagtctcagaatatacaagtaccactgggcttgtaccatgttcagcaacaccaacaacttttggggacctcagagcagccaatggccaagggcaacaacgacgccgaattacatctgtccagccacctacaggcctccaggaatggctaaaaatgtttcagagctggagtggaccagagaaattgcttgctttagatgaactcattgatagttgtgaaccaacacaagtaaaacatatgatgcaagtgatagaaccccagtttcaacgagacttcatttcattgctccctaaagagttggcactctatgtgctttcattcctggaacccaaagacctgctacaagcagctcagacatgtcgctactggagaattttggctgaagacaaccttctctggagagagaaatgcaaagaagaggggattgatgaaccattgcacatcaagagaagaaaagtaataaaaccaggtttcatacacagtccatggaaaagtgcatacatcagacagcacagaattgatactaactcgaggcgaggaggcagcggcagcggcagcggcagcggcagcgatgacctaggcgccaacgacgaactgatttccttcaaagacgagggcgaacaggaggagaagagctccgaaaactcctcggcagagagggatttagctgatgtcaaatcgtctctagtcaatgaatcagaaacgtaa

SEQ ID NO: 1727 - DNA, 1305 bp, synthetic construct
  source 1..1305: mol_type = other DNA; note = HA-FBXW7a-(GS)6-TCF4 nucleic acid
atgtacccatacgatgttccagattacgctaatcaggaactgctctctgtgggcagcaaaagacgacgaactggaggctctctgagaggtaacccttcctcaagccaggtagatgaagaacagatgaatcgtgtggtagaggaggaacagcaacagcaactcagacaacaagaggaggagcacactgcaaggaatggtgaagttgttggagtagaacctagacctggaggccaaaatgattcccagcaaggacagttggaagaaaacaataatagatttatttcggtagatgaggactcctcaggaaaccaagaagaacaagaggaagatgaagaacatgctggtgaacaagatgaggaggatgaggaggaggaggagatggaccaggagagtgacgattttgatcagtctgatgatagtagcagagaagatgaacatacacatactaacagtgtcacgaactccagtagtattgtggacctgcccgttcaccaactctcctccccattctatacaaaaacaacaaaaatgaaaagaaagttggaccatggttctgaggtccgctctttttctttgggaaagaaaccatgcaaagtctcagaatatacaagtaccactgggcttgtaccatgttcagcaacaccaacaacttttggggacctcagagcagccaatggccaagggcaacaacgacgccgaattacatctgtccagccacctacaggcctccaggaatggctaaaaatgtttcagagctggagtggaccagagaaattgcttgctttagatgaactcattgatagttgtgaaccaacacaagtaaaacatatgatgcaagtgatagaaccccagtttcaacgagacttcatttcattgctccctaaagagttggcactctatgtgctttcattcctggaacccaaagacctgctacaagcagctcagacatgtcgctactggagaattttggctgaagacaaccttctctggagagagaaatgcaaagaagaggggattgatgaaccattgcacatcaagagaagaaaagtaataaaaccaggtttcatacacagtccatggaaaagtgcatacatcagacagcacagaattgatactaactcgaggcgaggaggcagcggcagcggcagcggcagcggcagcggcagcgatgacctaggcgccaacgacgaactgatttccttcaaagacgagggcgaacaggaggagaagagctccgaaaactcctcggcagagagggatttagctgatgtcaaatcgtctctagtcaatgaatcagaaacgtaa

SEQ ID NO: 1728 - DNA, 1152 bp, synthetic construct
  source 1..1152: mol_type = other DNA; note = NLS-Keap1-(GS)1-TCF4 nucleic acid
ccggcggcgaaacgcgtgaaactggatggcagcggcagcggcagccagccagatcccaggcctagcggggctggggcctgctgccgattcctgcccctgcagtcacagtgccctgagggggcaggggacgcggtgatgtacgcctccactgagtgcaaggcggaggtgacgccctcccagcatggcaaccgcaccttcagctacaccctggaggatcataccaagcaggcctttggcatcatgaacgagctgcggctcagccagcagctgtgtgacgtcacactgcaggtcaagtaccaggatgcaccggccgcccagttcatggcccacaaggtggtgctggcctcatccagccctgtcttcaaggccatgttcaccaacgggctgcgggagcagggcatggaggtggtgtccattgagggtatccaccccaaggtcatggagcgcctcattgaattcgcctacacggcctccatctccatgggcgagaagtgtgtcctccacgtcatgaacggtgctgtcatgtaccagatcgacagcgttgtccgtgcctgcagtgacttcctggtgcagcagctggaccccagcaatgccatcggcatcgccaacttcgctgagcagattggctgtgtggagttgcaccagcgtgcccgggagtacatctacatgcattttggggaggtggccaagcaagaggagttcttcaacctgtcccactgccaactggtgaccctcatcagccgggacgacctgaacgtgcgctgcgagtccgaggtcttccacgcctgcatcaactgggtcaagtacgactgcgaacagcgacggttctacgtccaggcgctgctgcgggccgtgcgctgccactcgttgacgccgaacttcctgcagatgcagctgcagaagtgcgagatcctgcagtccgactcccgctgcaaggactacctggtcaagatcttcgaggagctcaccctgcacaagcccacgcaggtgatgccctgccgggcgcccggcagcgatgacctaggcgccaacgacgaactgatttccttcaaagacgagggcgaacaggaggagaagagctccgaaaactcctcggcagagagggatttagctgatgtcaaatcgtctctagtcaatgaatcagaaacgtaa

SEQ ID NO: 1729 - DNA, 1158 bp, synthetic construct
  source 1..1158: mol_type = other DNA; note = NLS-Keap1-(GS)2-TCF4 nucleic acid
ccggcggcgaaacgcgtgaaactggatggcagcggcagcggcagccagccagatcccaggcctagcggggctggggcctgctgccgattcctgcccctgcagtcacagtgccctgagggggcaggggacgcggtgatgtacgcctccactgagtgcaaggcggaggtgacgccctcccagcatggcaaccgcaccttcagctacaccctggaggatcataccaagcaggcctttggcatcatgaacgagctgcggctcagccagcagctgtgtgacgtcacactgcaggtcaagtaccaggatgcaccggccgcccagttcatggcccacaaggtggtgctggcctcatccagccctgtcttcaaggccatgttcaccaacgggctgcgggagcagggcatggaggtggtgtccattgagggtatccaccccaaggtcatggagcgcctcattgaattcgcctacacggcctccatctccatgggcgagaagtgtgtcctccacgtcatgaacggtgctgtcatgtaccagatcgacagcgttgtccgtgcctgcagtgacttcctggtgcagcagctggaccccagcaatgccatcggcatcgccaacttcgctgagcagattggctgtgtggagttgcaccagcgtgcccgggagtacatctacatgcattttggggaggtggccaagcaagaggagttcttcaacctgtcccactgccaactggtgaccctcatcagccgggacgacctgaacgtgcgctgcgagtccgaggtcttccacgcctgcatcaactgggtcaagtacgactgcgaacagcgacggttctacgtccaggcgctgctgcgggccgtgcgctgccactcgttgacgccgaacttcctgcagatgcagctgcagaagtgcgagatcctgcagtccgactcccgctgcaaggactacctggtcaagatcttcgaggagctcaccctgcacaagcccacgcaggtgatgccctgccgggcgcccggcagcggcagcgatgacctaggcgccaacgacgaactgatttccttcaaagacgagggcgaacaggaggagaagagctccgaaaactcctcggcagagagggatttagctgatgtcaaatcgtctctagtcaatgaatcagaaacgtaa

SEQ ID NO: 1730 - DNA, 1164 bp, synthetic construct
  source 1..1164: mol_type = other DNA; note = NLS-Keap1-(GS)3-TCF4 nucleic acid
ccggcggcgaaacgcgtgaaactggatggcagcggcagcggcagccagccagatcccaggcctagcggggctggggcctgctgccgattcctgcccctgcagtcacagtgccctgagggggcaggggacgcggtgatgtacgcctccactgagtgcaaggcggaggtgacgccctcccagcatggcaaccgcaccttcagctacaccctggaggatcataccaagcaggcctttggcatcatgaacgagctgcggctcagccagcagctgtgtgacgtcacactgcaggtcaagtaccaggatgcaccggccgcccagttcatggcccacaaggtggtgctggcctcatccagccctgtcttcaaggccatgttcaccaacgggctgcgggagcagggcatggaggtggtgtccattgagggtatccaccccaaggtcatggagcgcctcattgaattcgcctacacggcctccatctccatgggcgagaagtgtgtcctccacgtcatgaacggtgctgtcatgtaccagatcgacagcgttgtccgtgcctgcagtgacttcctggtgcagcagctggaccccagcaatgccatcggcatcgccaacttcgctgagcagattggctgtgtggagttgcaccagcgtgcccgggagtacatctacatgcattttggggaggtggccaagcaagaggagttcttcaacctgtcccactgccaactggtgaccctcatcagccgggacgacctgaacgtgcgctgcgagtccgaggtcttccacgcctgcatcaactgggtcaagtacgactgcgaacagcgacggttctacgtccaggcgctgctgcgggccgtgcgctgccactcgttgacgccgaacttcctgcagatgcagctgcagaagtgcgagatcctgcagtccgactcccgctgcaaggactacctggtcaagatcttcgaggagctcaccctgcacaagcccacgcaggtgatgccctgccgggcgcccggcagcggcagcggcagcgatgacctaggcgccaacgacgaactgatttccttcaaagacgagggcgaacaggaggagaagagctccgaaaactcctcggcagagagggatttagctgatgtcaaatcgtctctagtcaatgaatcagaaacgtaa

SEQ ID NO: 1731 - DNA, 1170 bp, synthetic construct
  source 1..1170: mol_type = other DNA; note = NLS-Keap1-(GS)4-TCF4 nucleic acid
ccggcggcgaaacgcgtgaaactggatggcagcggcagcggcagccagccagatcccaggcctagcggggctggggcctgctgccgattcctgcccctgcagtcacagtgccctgagggggcaggggacgcggtgatgtacgcctccactgagtgcaaggcggaggtgacgccctcccagcatggcaaccgcaccttcagctacaccctggaggatcataccaagcaggcctttggcatcatgaacgagctgcggctcagccagcagctgtgtgacgtcacactgcaggtcaagtaccaggatgcaccggccgcccagttcatggcccacaaggtggtgctggcctcatccagccctgtcttcaaggccatgttcaccaacgggctgcgggagcagggcatggaggtggtgtccattgagggtatccaccccaaggtcatggagcgcctcattgaattcgcctacacggcctccatctccatgggcgagaagtgtgtcctccacgtcatgaacggtgctgtcatgtaccagatcgacagcgttgtccgtgcctgcagtgacttcctggtgcagcagctggaccccagcaatgccatcggcatcgccaacttcgctgagcagattggctgtgtggagttgcaccagcgtgcccgggagtacatctacatgcattttggggaggtggccaagcaagaggagttcttcaacctgtcccactgccaactggtgaccctcatcagccgggacgacctgaacgtgcgctgcgagtccgaggtcttccacgcctgcatcaactgggtcaagtacgactgcgaacagcgacggttctacgtccaggcgctgctgcgggccgtgcgctgccactcgttgacgccgaacttcctgcagatgcagctgcagaagtgcgagatcctgcagtccgactcccgctgcaaggactacctggtcaagatcttcgaggagctcaccctgcacaagcccacgcaggtgatgccctgccgggcgcccggcagcggcagcggcagcggcagcgatgacctaggcgccaacgacgaactgatttccttcaaagacgagggcgaacaggaggagaagagctccgaaaactcctcggcagagagggatttagctgatgtcaaatcgtctctagtcaatgaatcagaaacgtaa

SEQ ID NO: 1732 - DNA, 1176 bp, synthetic construct
  source 1..1176: mol_type = other DNA; note = NLS-Keap1-(GS)5-TCF4 nucleic acid
ccggcggcgaaacgcgtgaaactggatggcagcggcagcggcagccagccagatcccaggcctagcggggctggggcctgctgccgattcctgcccctgcagtcacagtgccctgagggggcaggggacgcggtgatgtacgcctccactgagtgcaaggcggaggtgacgccctcccagcatggcaaccgcaccttcagctacaccctggaggatcataccaagcaggcctttggcatcatgaacgagctgcggctcagccagcagctgtgtgacgtcacactgcaggtcaagtaccaggatgcaccggccgcccagttcatggcccacaaggtggtgctggcctcatccagccctgtcttcaaggccatgttcaccaacgggctgcgggagcagggcatggaggtggtgtccattgagggtatccaccccaaggtcatggagcgcctcattgaattcgcctacacggcctccatctccatgggcgagaagtgtgtcctccacgtcatgaacggtgctgtcatgtaccagatcgacagcgttgtccgtgcctgcagtgacttcctggtgcagcagctggaccccagcaatgccatcggcatcgccaacttcgctgagcagattggctgtgtggagttgcaccagcgtgcccgggagtacatctacatgcattttggggaggtggccaagcaagaggagttcttcaacctgtcccactgccaactggtgaccctcatcagccgggacgacctgaacgtgcgctgcgagtccgaggtcttccacgcctgcatcaactgggtcaagtacgactgcgaacagcgacggttctacgtccaggcgctgctgcgggccgtgcgctgccactcgttgacgccgaacttcctgcagatgcagctgcagaagtgcgagatcctgcagtccgactcccgctgcaaggactacctggtcaagatcttcgaggagctcaccctgcacaagcccacgcaggtgatgccctgccgggcgcccggcagcggcagcggcagcggcagcggcagcgatgacctaggcgccaacgacgaactgatttccttcaaagacgagggcgaacaggaggagaagagctccgaaaactcctcggcagagagggatttagctgatgtcaaatcgtctctagtcaatgaatcagaaacgtaa

SEQ ID NO: 1733 - DNA, 1182 bp, synthetic construct
  source 1..1182: mol_type = other DNA; note = NLS-Keap1-(GS)6-TCF4 nucleic acid
ccggcggcgaaacgcgtgaaactggatggcagcggcagcggcagccagccagatcccaggcctagcggggctggggcctgctgccgattcctgcccctgcagtcacagtgccctgagggggcaggggacgcggtgatgtacgcctccactgagtgcaaggcggaggtgacgccctcccagcatggcaaccgcaccttcagctacaccctggaggatcataccaagcaggcctttggcatcatgaacgagctgcggctcagccagcagctgtgtgacgtcacactgcaggtcaagtaccaggatgcaccggccgcccagttcatggcccacaaggtggtgctggcctcatccagccctgtcttcaaggccatgttcaccaacgggctgcgggagcagggcatggaggtggtgtccattgagggtatccaccccaaggtcatggagcgcctcattgaattcgcctacacggcctccatctccatgggcgagaagtgtgtcctccacgtcatgaacggtgctgtcatgtaccagatcgacagcgttgtccgtgcctgcagtgacttcctggtgcagcagctggaccccagcaatgccatcggcatcgccaacttcgctgagcagattggctgtgtggagttgcaccagcgtgcccgggagtacatctacatgcattttggggaggtggccaagcaagaggagttcttcaacctgtcccactgccaactggtgaccctcatcagccgggacgacctgaacgtgcgctgcgagtccgaggtcttccacgcctgcatcaactgggtcaagtacgactgcgaacagcgacggttctacgtccaggcgctgctgcgggccgtgcgctgccactcgttgacgccgaacttcctgcagatgcagctgcagaagtgcgagatcctgcagtccgactcccgctgcaaggactacctggtcaagatcttcgaggagctcaccctgcacaagcccacgcaggtgatgccctgccgggcgcccggcagcggcagcggcagcggcagcggcagcggcagcgatgacctaggcgccaacgacgaactgatttccttcaaagacgagggcgaacaggaggagaagagctccgaaaactcctcggcagagagggatttagctgatgtcaaatcgtctctagtcaatgaatcagaaacgtaa

SEQ ID NO: 1734 - DNA, 1182 bp, synthetic construct
  source 1..1182: mol_type = other DNA; note = HA-NLS-Keap1-(GS)1-TCF4 nucleic acid
atgtacccatacgatgttccagattacgctccggcggcgaaacgcgtgaaactggatggcagcggcagcggcagccagccagatcccaggcctagcggggctggggcctgctgccgattcctgcccctgcagtcacagtgccctgagggggcaggggacgcggtgatgtacgcctccactgagtgcaaggcggaggtgacgccctcccagcatggcaaccgcaccttcagctacaccctggaggatcataccaagcaggcctttggcatcatgaacgagctgcggctcagccagcagctgtgtgacgtcacactgcaggtcaagtaccaggatgcaccggccgcccagttcatggcccacaaggtggtgctggcctcatccagccctgtcttcaaggccatgttcaccaacgggctgcgggagcagggcatggaggtggtgtccattgagggtatccaccccaaggtcatggagcgcctcattgaattcgcctacacggcctccatctccatgggcgagaagtgtgtcctccacgtcatgaacggtgctgtcatgtaccagatcgacagcgttgtccgtgcctgcagtgacttcctggtgcagcagctggaccccagcaatgccatcggcatcgccaacttcgctgagcagattggctgtgtggagttgcaccagcgtgcccgggagtacatctacatgcattttggggaggtggccaagcaagaggagttcttcaacctgtcccactgccaactggtgaccctcatcagccgggacgacctgaacgtgcgctgcgagtccgaggtcttccacgcctgcatcaactgggtcaagtacgactgcgaacagcgacggttctacgtccaggcgctgctgcgggccgtgcgctgccactcgttgacgccgaacttcctgcagatgcagctgcagaagtgcgagatcctgcagtccgactcccgctgcaaggactacctggtcaagatcttcgaggagctcaccctgcacaagcccacgcaggtgatgccctgccgggcgcccggcagcgatgacctaggcgccaacgacgaactgatttccttcaaagacgagggcgaacaggaggagaagagctccgaaaactcctcggcagagagggatttagctgatgtcaaatcgtctctagtcaatgaatcagaaacgtaa

SEQ ID NO: 1735 - DNA, 1188 bp, synthetic construct
  source 1..1188: mol_type = other DNA; note = HA-NLS-Keap1-(GS)2-TCF4 nucleic acid
atgtacccatacgatgttccagattacgctccggcggcgaaacgcgtgaaactggatggcagcggcagcggcagccagccagatcccaggcctagcggggctggggcctgctgccgattcctgcccctgcagtcacagtgccctgagggggcaggggacgcggtgatgtacgcctccactgagtgcaaggcggaggtgacgccctcccagcatggcaaccgcaccttcagctacaccctggaggatcataccaagcaggcctttggcatcatgaacgagctgcggctcagccagcagctgtgtgacgtcacactgcaggtcaagtaccaggatgcaccggccgcccagttcatggcccacaaggtggtgctggcctcatccagccctgtcttcaaggccatgttcaccaacgggctgcgggagcagggcatggaggtggtgtccattgagggtatccaccccaaggtcatggagcgcctcattgaattcgcctacacggcctccatctccatgggcgagaagtgtgtcctccacgtcatgaacggtgctgtcatgtaccagatcgacagcgttgtccgtgcctgcagtgacttcctggtgcagcagctggaccccagcaatgccatcggcatcgccaacttcgctgagcagattggctgtgtggagttgcaccagcgtgcccgggagtacatctacatgcattttggggaggtggccaagcaagaggagttcttcaacctgtcccactgccaactggtgaccctcatcagccgggacgacctgaacgtgcgctgcgagtccgaggtcttccacgcctgcatcaactgggtcaagtacgactgcgaacagcgacggttctacgtccaggcgctgctgcgggccgtgcgctgccactcgttgacgccgaacttcctgcagatgcagctgcagaagtgcgagatcctgcagtccgactcccgctgcaaggactacctggtcaagatcttcgaggagctcaccctgcacaagcccacgcaggtgatgccctgccgggcgcccggcagcggcagcgatgacctaggcgccaacgacgaactgatttccttcaaagacgagggcgaacaggaggagaagagctccgaaaactcctcggcagagagggatttagctgatgtcaaatcgtctctagtcaatgaatcagaaacgtaa

SEQ ID NO: 1736 - DNA, 1194 bp, synthetic construct
  source 1..1194: mol_type = other DNA; note = HA-NLS-Keap1-(GS)3-TCF4 nucleic acid
atgtacccatacgatgttccagattacgctccggcggcgaaacgcgtgaaactggatggcagcggcagcggcagccagccagatcccaggcctagcggggctggggcctgctgccgattcctgcccctgcagtcacagtgccctgagggggcaggggacgcggtgatgtacgcctccactgagtgcaaggcggaggtgacgccctcccagcatggcaaccgcaccttcagctacaccctggaggatcataccaagcaggcctttggcatcatgaacgagctgcggctcagccagcagctgtgtgacgtcacactgcaggtcaagtaccaggatgcaccggccgcccagttcatggcccacaaggtggtgctggcctcatccagccctgtcttcaaggccatgttcaccaacgggctgcgggagcagggcatggaggtggtgtccattgagggtatccaccccaaggtcatggagcgcctcattgaattcgcctacacggcctccatctccatgggcgagaagtgtgtcctccacgtcatgaacggtgctgtcatgtaccagatcgacagcgttgtccgtgcctgcagtgacttcctggtgcagcagctggaccccagcaatgccatcggcatcgccaacttcgctgagcagattggctgtgtggagttgcaccagcgtgcccgggagtacatctacatgcattttggggaggtggccaagcaagaggagttcttcaacctgtcccactgccaactggtgaccctcatcagccgggacgacctgaacgtgcgctgcgagtccgaggtcttccacgcctgcatcaactgggtcaagtacgactgcgaacagcgacggttctacgtccaggcgctgctgcgggccgtgcgctgccactcgttgacgccgaacttcctgcagatgcagctgcagaagtgcgagatcctgcagtccgactcccgctgcaaggactacctggtcaagatcttcgaggagctcaccctgcacaagcccacgcaggtgatgccctgccgggcgcccggcagcggcagcggcagcgatgacctaggcgccaacgacgaactgatttccttcaaagacgagggcgaacaggaggagaagagctccgaaaactcctcggcagagagggatttagctgatgtcaaatcgtctctagtcaatgaatcagaaacgtaa

SEQ ID NO: 1737 - DNA, 1200 bp, synthetic construct
  source 1..1200: mol_type = other DNA; note = HA-NLS-Keap1-(GS)4-TCF4 nucleic acid
atgtacccatacgatgttccagattacgctccggcggcgaaacgcgtgaaactggatggcagcggcagcggcagccagccagatcccaggcctagcggggctggggcctgctgccgattcctgcccctgcagtcacagtgccctgagggggcaggggacgcggtgatgtacgcctccactgagtgcaaggcggaggtgacgccctcccagcatggcaaccgcaccttcagctacaccctggaggatcataccaagcaggcctttggcatcatgaacgagctgcggctcagccagcagctgtgtgacgtcacactgcaggtcaagtaccaggatgcaccggccgcccagttcatggcccacaaggtggtgctggcctcatccagccctgtcttcaaggccatgttcaccaacgggctgcgggagcagggcatggaggtggtgtccattgagggtatccaccccaaggtcatggagcgcctcattgaattcgcctacacggcctccatctccatgggcgagaagtgtgtcctccacgtcatgaacggtgctgtcatgtaccagatcgacagcgttgtccgtgcctgcagtgacttcctggtgcagcagctggaccccagcaatgccatcggcatcgccaacttcgctgagcagattggctgtgtggagttgcaccagcgtgcccgggagtacatctacatgcattttggggaggtggccaagcaagaggagttcttcaacctgtcccactgccaactggtgaccctcatcagccgggacgacctgaacgtgcgctgcgagtccgaggtcttccacgcctgcatcaactgggtcaagtacgactgcgaacagcgacggttctacgtccaggcgctgctgcgggccgtgcgctgccactcgttgacgccgaacttcctgcagatgcagctgcagaagtgcgagatcctgcagtccgactcccgctgcaaggactacctggtcaagatcttcgaggagctcaccctgcacaagcccacgcaggtgatgccctgccgggcgcccggcagcggcagcggcagcggcagcgatgacctaggcgccaacgacgaactgatttccttcaaagacgagggcgaacaggaggagaagagctccgaaaactcctcggcagagagggatttagctgatgtcaaatcgtctctagtcaatgaatcagaaacgtaa

SEQ ID NO: 1738 - DNA, 1206 bp, synthetic construct
  source 1..1206: mol_type = other DNA; note = HA-NLS-Keap1-(GS)5-TCF4 nucleic acid
atgtacccatacgatgttccagattacgctccggcggcgaaacgcgtgaaactggatggcagcggcagcggcagccagccagatcccaggcctagcggggctggggcctgctgccgattcctgcccctgcagtcacagtgccctgagggggcaggggacgcggtgatgtacgcctccactgagtgcaaggcggaggtgacgccctcccagcatggcaaccgcaccttcagctacaccctggaggatcataccaagcaggcctttggcatcatgaacgagctgcggctcagccagcagctgtgtgacgtcacactgcaggtcaagtaccaggatgcaccggccgcccagttcatggcccacaaggtggtgctggcctcatccagccctgtcttcaaggccatgttcaccaacgggctgcgggagcagggcatggaggtggtgtccattgagggtatccaccccaaggtcatggagcgcctcattgaattcgcctacacggcctccatctccatgggcgagaagtgtgtcctccacgtcatgaacggtgctgtcatgtaccagatcgacagcgttgtccgtgcctgcagtgacttcctggtgcagcagctggaccccagcaatgccatcggcatcgccaacttcgctgagcagattggctgtgtggagttgcaccagcgtgcccgggagtacatctacatgcattttggggaggtggccaagcaagaggagttcttcaacctgtcccactgccaactggtgaccctcatcagccgggacgacctgaacgtgcgctgcgagtccgaggtcttccacgcctgcatcaactgggtcaagtacgactgcgaacagcgacggttctacgtccaggcgctgctgcgggccgtgcgctgccactcgttgacgccgaacttcctgcagatgcagctgcagaagtgcgagatcctgcagtccgactcccgctgcaaggactacctggtcaagatcttcgaggagctcaccctgcacaagcccacgcaggtgatgccctgccgggcgcccggcagcggcagcggcagcggcagcggcagcgatgacctaggcgccaacgacgaactgatttccttcaaagacgagggcgaacaggaggagaagagctccgaaaactcctcggcagagagggatttagctgatgtcaaatcgtctctagtcaatgaatcagaaacgtaa

SEQ ID NO: 1739 - DNA, 1212 bp, synthetic construct
  source 1..1212: mol_type = other DNA; note = HA-NLS-Keap1-(GS)6-TCF4 nucleic acid
atgtacccatacgatgttccagattacgctccggcggcgaaacgcgtgaaactggatggcagcggcagcggcagccagccagatcccaggcctagcggggctggggcctgctgccgattcctgcccctgcagtcacagtgccctgagggggcaggggacgcggtgatgtacgcctccactgagtgcaaggcggaggtgacgccctcccagcatggcaaccgcaccttcagctacaccctggaggatcataccaagcaggcctttggcatcatgaacgagctgcggctcagccagcagctgtgtgacgtcacactgcaggtcaagtaccaggatgcaccggccgcccagttcatggcccacaaggtggtgctggcctcatccagccctgtcttcaaggccatgttcaccaacgggctgcgggagcagggcatggaggtggtgtccattgagggtatccaccccaaggtcatggagcgcctcattgaattcgcctacacggcctccatctccatgggcgagaagtgtgtcctccacgtcatgaacggtgctgtcatgtaccagatcgacagcgttgtccgtgcctgcagtgacttcctggtgcagcagctggaccccagcaatgccatcggcatcgccaacttcgctgagcagattggctgtgtggagttgcaccagcgtgcccgggagtacatctacatgcattttggggaggtggccaagcaagaggagttcttcaacctgtcccactgccaactggtgaccctcatcagccgggacgacctgaacgtgcgctgcgagtccgaggtcttccacgcctgcatcaactgggtcaagtacgactgcgaacagcgacggttctacgtccaggcgctgctgcgggccgtgcgctgccactcgttgacgccgaacttcctgcagatgcagctgcagaagtgcgagatcctgcagtccgactcccgctgcaaggactacctggtcaagatcttcgaggagctcaccctgcacaagcccacgcaggtgatgccctgccgggcgcccggcagcggcagcggcagcggcagcggcagcggcagcgatgacctaggcgccaacgacgaactgatttccttcaaagacgagggcgaacaggaggagaagagctccgaaaactcctcggcagagagggatttagctgatgtcaaatcgtctctagtcaatgaatcagaaacgtaa

SEQ ID NO: 1740 - DNA, 570 bp, synthetic construct
  source 1..570: mol_type = other DNA; note = NLS-RNF125-(GS)1-TCF4 nucleic acid
ccggcggcgaaacgcgtgaaactggatggcagcggcagcggcagcggctccgtgctgagcaccgacagcggcaaatcggcgcccgcctctgccaccgcgcgggccctggagcgcaggagggacccggagttgcccgtcacgtccttcgactgcgccgtgtgccttgaggtgttacaccagcctgtccggacccgctgcggccacgtattctgccgttcctgtattgctaccagtctgaagaacaacaagtggacctgtccttattgccgggcatatcttccttcagaaggagttccagcaactgatgtagccaaaagaatgaaatcagagtataagaactgcgctgagtgtgacaccctggtttgcctcagtgaaatgagggcacatattcggacttgtcagaagtacatagataagtatggaccaggcagcgatgacctaggcgccaacgacgaactgatttccttcaaagacgagggcgaacaggaggagaagagctccgaaaactcctcggcagagagggatttagctgatgtcaaatcgtctctagtcaatgaatcagaaacgtaa

SEQ ID NO: 1741 - DNA, 576 bp, synthetic construct
  source 1..576: mol_type = other DNA; note = NLS-RNF125-(GS)2-TCF4 nucleic acid
ccggcggcgaaacgcgtgaaactggatggcagcggcagcggcagcggctccgtgctgagcaccgacagcggcaaatcggcgcccgcctctgccaccgcgcgggccctggagcgcaggagggacccggagttgcccgtcacgtccttcgactgcgccgtgtgccttgaggtgttacaccagcctgtccggacccgctgcggccacgtattctgccgttcctgtattgctaccagtctgaagaacaacaagtggacctgtccttattgccgggcatatcttccttcagaaggagttccagcaactgatgtagccaaaagaatgaaatcagagtataagaactgcgctgagtgtgacaccctggtttgcctcagtgaaatgagggcacatattcggacttgtcagaagtacatagataagtatggaccaggcagcggcagcgatgacctaggcgccaacgacgaactgatttccttcaaagacgagggcgaacaggaggagaagagctccgaaaactcctcggcagagagggatttagctgatgtcaaatcgtctctagtcaatgaatcagaaacgtaa

SEQ ID NO: 1742 - DNA, 582 bp, synthetic construct
  source 1..582: mol_type = other DNA; note = NLS-RNF125-(GS)3-TCF4 nucleic acid
ccggcggcgaaacgcgtgaaactggatggcagcggcagcggcagcggctccgtgctgagcaccgacagcggcaaatcggcgcccgcctctgccaccgcgcgggccctggagcgcaggagggacccggagttgcccgtcacgtccttcgactgcgccgtgtgccttgaggtgttacaccagcctgtccggacccgctgcggccacgtattctgccgttcctgtattgctaccagtctgaagaacaacaagtggacctgtccttattgccgggcatatcttccttcagaaggagttccagcaactgatgtagccaaaagaatgaaatcagagtataagaactgcgctgagtgtgacaccctggtttgcctcagtgaaatgagggcacatattcggacttgtcagaagtacatagataagtatggaccaggcagcggcagcggcagcgatgacctaggcgccaacgacgaactgatttccttcaaagacgagggcgaacaggaggagaagagctccgaaaactcctcggcagagagggatttagctgatgtcaaatcgtctctagtcaatgaatcagaaacgtaa

SEQ ID NO: 1743 - DNA, 588 bp, synthetic construct
  source 1..588: mol_type = other DNA; note = NLS-RNF125-(GS)4-TCF4 nucleic acid
ccggcggcgaaacgcgtgaaactggatggcagcggcagcggcagcggctccgtgctgagcaccgacagcggcaaatcggcgcccgcctctgccaccgcgcgggccctggagcgcaggagggacccggagttgcccgtcacgtccttcgactgcgccgtgtgccttgaggtgttacaccagcctgtccggacccgctgcggccacgtattctgccgttcctgtattgctaccagtctgaagaacaacaagtggacctgtccttattgccgggcatatcttccttcagaaggagttccagcaactgatgtagccaaaagaatgaaatcagagtataagaactgcgctgagtgtgacaccctggtttgcctcagtgaaatgagggcacatattcggacttgtcagaagtacatagataagtatggaccaggcagcggcagcggcagcggcagcgatgacctaggcgccaacgacgaactgatttccttcaaagacgagggcgaacaggaggagaagagctccgaaaactcctcggcagagagggatttagctgatgtcaaatcgtctctagtcaatgaatcagaaacgtaa

SEQ ID NO: 1744 - DNA, 594 bp, synthetic construct
  source 1..594: mol_type = other DNA; note = NLS-RNF125-(GS)5-TCF4 nucleic acid
ccggcggcgaaacgcgtgaaactggatggcagcggcagcggcagcggctccgtgctgagcaccgacagcggcaaatcggcgcccgcctctgccaccgcgcgggccctggagcgcaggagggacccggagttgcccgtcacgtccttcgactgcgccgtgtgccttgaggtgttacaccagcctgtccggacccgctgcggccacgtattctgccgttcctgtattgctaccagtctgaagaacaacaagtggacctgtccttattgccgggcatatcttccttcagaaggagttccagcaactgatgtagccaaaagaatgaaatcagagtataagaactgcgctgagtgtgacaccctggtttgcctcagtgaaatgagggcacatattcggacttgtcagaagtacatagataagtatggaccaggcagcggcagcggcagcggcagcggcagcgatgacctaggcgccaacgacgaactgatttccttcaaagacgagggcgaacaggaggagaagagctccgaaaactcctcggcagagagggatttagctgatgtcaaatcgtctctagtcaatgaatcagaaacgtaa

SEQ ID NO: 1745 - DNA, 600 bp, synthetic construct
  source 1..600: mol_type = other DNA; note = NLS-RNF125-(GS)6-TCF4 nucleic acid
ccggcggcgaaacgcgtgaaactggatggcagcggcagcggcagcggctccgtgctgagcaccgacagcggcaaatcggcgcccgcctctgccaccgcgcgggccctggagcgcaggagggacccggagttgcccgtcacgtccttcgactgcgccgtgtgccttgaggtgttacaccagcctgtccggacccgctgcggccacgtattctgccgttcctgtattgctaccagtctgaagaacaacaagtggacctgtccttattgccgggcatatcttccttcagaaggagttccagcaactgatgtagccaaaagaatgaaatcagagtataagaactgcgctgagtgtgacaccctggtttgcctcagtgaaatgagggcacatattcggacttgtcagaagtacatagataagtatggaccaggcagcggcagcggcagcggcagcggcagcggcagcgatgacctaggcgccaacgacgaactgatttccttcaaagacgagggcgaacaggaggagaagagctccgaaaactcctcggcagagagggatttagctgatgtcaaatcgtctctagtcaatgaatcagaaacgtaa

SEQ ID NO: 1746 - DNA, 600 bp, synthetic construct
  source 1..600: mol_type = other DNA; note = HA-NLS-RNF125-(GS)1-TCF4 nucleic acid
atgtacccatacgatgttccagattacgctccggcggcgaaacgcgtgaaactggatggcagcggcagcggcagcggctccgtgctgagcaccgacagcggcaaatcggcgcccgcctctgccaccgcgcgggccctggagcgcaggagggacccggagttgcccgtcacgtccttcgactgcgccgtgtgccttgaggtgttacaccagcctgtccggacccgctgcggccacgtattctgccgttcctgtattgctaccagtctgaagaacaacaagtggacctgtccttattgccgggcatatcttccttcagaaggagttccagcaactgatgtagccaaaagaatgaaatcagagtataagaactgcgctgagtgtgacaccctggtttgcctcagtgaaatgagggcacatattcggacttgtcagaagtacatagataagtatggaccaggcagcgatgacctaggcgccaacgacgaactgatttccttcaaagacgagggcgaacaggaggagaagagctccgaaaactcctcggcagagagggatttagctgatgtcaaatcgtctctagtcaatgaatcagaaacgtaa

SEQ ID NO: 1747 - DNA, 606 bp, synthetic construct
  source 1..606: mol_type = other DNA; note = HA-NLS-RNF125-(GS)2-TCF4 nucleic acid
atgtacccatacgatgttccagattacgctccggcggcgaaacgcgtgaaactggatggcagcggcagcggcagcggctccgtgctgagcaccgacagcggcaaatcggcgcccgcctctgccaccgcgcgggccctggagcgcaggagggacccggagttgcccgtcacgtccttcgactgcgccgtgtgccttgaggtgttacaccagcctgtccggacccgctgcggccacgtattctgccgttcctgtattgctaccagtctgaagaacaacaagtggacctgtccttattgccgggcatatcttccttcagaaggagttccagcaactgatgtagccaaaagaatgaaatcagagtataagaactgcgctgagtgtgacaccctggtttgcctcagtgaaatgagggcacatattcggacttgtcagaagtacatagataagtatggaccaggcagcggcagcgatgacctaggcgccaacgacgaactgatttccttcaaagacgagggcgaacaggaggagaagagctccgaaaactcctcggcagagagggatttagctgatgtcaaatcgtctctagtcaatgaatcagaaacgtaa

SEQ ID NO: 1748 - DNA, 612 bp, synthetic construct
  source 1..612: mol_type = other DNA; note = HA-NLS-RNF125-(GS)3-TCF4 nucleic acid
atgtacccatacgatgttccagattacgctccggcggcgaaacgcgtgaaactggatggcagcggcagcggcagcggctccgtgctgagcaccgacagcggcaaatcggcgcccgcctctgccaccgcgcgggccctggagcgcaggagggacccggagttgcccgtcacgtccttcgactgcgccgtgtgccttgaggtgttacaccagcctgtccggacccgctgcggccacgtattctgccgttcctgtattgctaccagtctgaagaacaacaagtggacctgtccttattgccgggcatatcttccttcagaaggagttccagcaactgatgtagccaaaagaatgaaatcagagtataagaactgcgctgagtgtgacaccctggtttgcctcagtgaaatgagggcacatattcggacttgtcagaagtacatagataagtatggaccaggcagcggcagcggcagcgatgacctaggcgccaacgacgaactgatttccttcaaagacgagggcgaacaggaggagaagagctccgaaaactcctcggcagagagggatttagctgatgtcaaatcgtctctagtcaatgaatcagaaacgtaa

SEQ ID NO: 1749 - DNA, 618 bp, synthetic construct
  source 1..618: mol_type = other DNA; note = HA-NLS-RNF125-(GS)4-TCF4 nucleic acid
atgtacccatacgatgttccagattacgctccggcggcgaaacgcgtgaaactggatggcagcggcagcggcagcggctccgtgctgagcaccgacagcggcaaatcggcgcccgcctctgccaccgcgcgggccctggagcgcaggagggacccggagttgcccgtcacgtccttcgactgcgccgtgtgccttgaggtgttacaccagcctgtccggacccgctgcggccacgtattctgccgttcctgtattgctaccagtctgaagaacaacaagtggacctgtccttattgccgggcatatcttccttcagaaggagttccagcaactgatgtagccaaaagaatgaaatcagagtataagaactgcgctgagtgtgacaccctggtttgcctcagtgaaatgagggcacatattcggacttgtcagaagtacatagataagtatggaccaggcagcggcagcggcagcggcagcgatgacctaggcgccaacgacgaactgatttccttcaaagacgagggcgaacaggaggagaagagctccgaaaactcctcggcagagagggatttagctgatgtcaaatcgtctctagtcaatgaatcagaaacgtaa

SEQ ID NO: 1750 - DNA, 624 bp, synthetic construct
  source 1..624: mol_type = other DNA; note = HA-NLS-RNF125-(GS)5-TCF4 nucleic acid
atgtacccatacgatgttccagattacgctccggcggcgaaacgcgtgaaactggatggcagcggcagcggcagcggctccgtgctgagcaccgacagcggcaaatcggcgcccgcctctgccaccgcgcgggccctggagcgcaggagggacccggagttgcccgtcacgtccttcgactgcgccgtgtgccttgaggtgttacaccagcctgtccggacccgctgcggccacgtattctgccgttcctgtattgctaccagtctgaagaacaacaagtggacctgtccttattgccgggcatatcttccttcagaaggagttccagcaactgatgtagccaaaagaatgaaatcagagtataagaactgcgctgagtgtgacaccctggtttgcctcagtgaaatgagggcacatattcggacttgtcagaagtacatagataagtatggaccaggcagcggcagcggcagcggcagcggcagcgatgacctaggcgccaacgacgaactgatttccttcaaagacgagggcgaacaggaggagaagagctccgaaaactcctcggcagagagggatttagctgatgtcaaatcgtctctagtcaatgaatcagaaacgtaa

SEQ ID NO: 1751 - DNA, 630 bp, synthetic construct
  source 1..630: mol_type = other DNA; note = HA-NLS-RNF125-(GS)6-TCF4 nucleic acid
atgtacccatacgatgttccagattacgctccggcggcgaaacgcgtgaaactggatggcagcggcagcggcagcggctccgtgctgagcaccgacagcggcaaatcggcgcccgcctctgccaccgcgcgggccctggagcgcaggagggacccggagttgcccgtcacgtccttcgactgcgccgtgtgccttgaggtgttacaccagcctgtccggacccgctgcggccacgtattctgccgttcctgtattgctaccagtctgaagaacaacaagtggacctgtccttattgccgggcatatcttccttcagaaggagttccagcaactgatgtagccaaaagaatgaaatcagagtataagaactgcgctgagtgtgacaccctggtttgcctcagtgaaatgagggcacatattcggacttgtcagaagtacatagataagtatggaccaggcagcggcagcggcagcggcagcggcagcggcagcgatgacctaggcgccaacgacgaactgatttccttcaaagacgagggcgaacaggaggagaagagctccgaaaactcctcggcagagagggatttagctgatgtcaaatcgtctctagtcaatgaatcagaaacgtaa

SEQ ID NO: 1752 - DNA, 867 bp, synthetic construct
  source 1..867: mol_type = other DNA; note = TCF4-(GS)1-SPOP-NLS nucleic acid
atggatgacctaggcgccaacgacgaactgatttccttcaaagacgagggcgaacaggaggagaagagctccgaaaactcctcggcagagagggatttagctgatgtcaaatcgtctctagtcaatgaatcagaaacgggcagcaacgggcttctccctgatgacaagcttaccctcttctgcgaggtgagtgttgtgcaagattctgtcaacatttctggccagaataccatgaacatggtaaaggttcctgagtgccggctggcagatgagttaggaggactgtgggagaattcccggttcacagactgctgcttgtgtgttgccggccaggaattccaggctcacaaggctatcttagcagctcgttctccggtttttagtgccatgtttgaacatgaaatggaggagagcaaaaagaatcgagttgaaatcaatgatgtggagcctgaagtttttaaggaaatgatgtgcttcatttacacggggaaggctccaaacctcgacaaaatggctgatgatttgctggcagctgctgacaagtatgccctggagcgcttaaaggtcatgtgtgaggatgccctctgcagtaacctgtccgtggagaacgctgcagaaattctcatcctggccgacctccacagtgcagatcagttgaaaactcaggcagtggatttcatcaactatcatgcttcggatgtcttggagacctctgggtggaagtcaatggtggtgtcacatccccacttggtggctgaggcataccgctctctggcttcagcacagtgcccttttctgggacccccacgcaaacgcctgaagcaatccggcagcggcagcccggcggcgaaacgcgtgaaactggat

SEQ ID NO: 1753 - DNA, 873 bp, synthetic construct
  source 1..873: mol_type = other DNA; note = TCF4-(GS)2-SPOP-NLS nucleic acid
atggatgacctaggcgccaacgacgaactgatttccttcaaagacgagggcgaacaggaggagaagagctccgaaaactcctcggcagagagggatttagctgatgtcaaatcgtctctagtcaatgaatcagaaacgggcagcggcagcaacgggcttctccctgatgacaagcttaccctcttctgcgaggtgagtgttgtgcaagattctgtcaacatttctggccagaataccatgaacatggtaaaggttcctgagtgccggctggcagatgagttaggaggactgtgggagaattcccggttcacagactgctgcttgtgtgttgccggccaggaattccaggctcacaaggctatcttagcagctcgttctccggtttttagtgccatgtttgaacatgaaatggaggagagcaaaaagaatcgagttgaaatcaatgatgtggagcctgaagtttttaaggaaatgatgtgcttcatttacacggggaaggctccaaacctcgacaaaatggctgatgatttgctggcagctgctgacaagtatgccctggagcgcttaaaggtcatgtgtgaggatgccctctgcagtaacctgtccgtggagaacgctgcagaaattctcatcctggccgacctccacagtgcagatcagttgaaaactcaggcagtggatttcatcaactatcatgcttcggatgtcttggagacctctgggtggaagtcaatggtggtgtcacatccccacttggtggctgaggcataccgctctctggcttcagcacagtgcccttttctgggacccccacgcaaacgcctgaagcaatccggcagcggcagcccggcggcgaaacgcgtgaaactggat

SEQ ID NO: 1754 - DNA, 879 bp, synthetic construct
  source 1..879: mol_type = other DNA; note = TCF4-(GS)3-SPOP-NLS nucleic acid
atggatgacctaggcgccaacgacgaactgatttccttcaaagacgagggcgaacaggaggagaagagctccgaaaactcctcggcagagagggatttagctgatgtcaaatcgtctctagtcaatgaatcagaaacgggcagcggcagcggcagcaacgggcttctccctgatgacaagcttaccctcttctgcgaggtgagtgttgtgcaagattctgtcaacatttctggccagaataccatgaacatggtaaaggttcctgagtgccggctggcagatgagttaggaggactgtgggagaattcccggttcacagactgctgcttgtgtgttgccggccaggaattccaggctcacaaggctatcttagcagctcgttctccggtttttagtgccatgtttgaacatgaaatggaggagagcaaaaagaatcgagttgaaatcaatgatgtggagcctgaagtttttaaggaaatgatgtgcttcatttacacggggaaggctccaaacctcgacaaaatggctgatgatttgctggcagctgctgacaagtatgccctggagcgcttaaaggtcatgtgtgaggatgccctctgcagtaacctgtccgtggagaacgctgcagaaattctcatcctggccgacctccacagtgcagatcagttgaaaactcaggcagtggatttcatcaactatcatgcttcggatgtcttggagacctctgggtggaagtcaatggtggtgtcacatccccacttggtggctgaggcataccgctctctggcttcagcacagtgcccttttctgggacccccacgcaaacgcctgaagcaatccggcagcggcagcccggcggcgaaacgcgtgaaactggat

SEQ ID NO: 1755 - DNA, 885 bp, synthetic construct
  source 1..885: mol_type = other DNA; note = TCF4-(GS)4-SPOP-NLS nucleic acid
atggatgacctaggcgccaacgacgaactgatttccttcaaagacgagggcgaacaggaggagaagagctccgaaaactcctcggcagagagggatttagctgatgtcaaatcgtctctagtcaatgaatcagaaacgggcagcggcagcggcagcggcagcaacgggcttctccctgatgacaagcttaccctcttctgcgaggtgagtgttgtgcaagattctgtcaacatttctggccagaataccatgaacatggtaaaggttcctgagtgccggctggcagatgagttaggaggactgtgggagaattcccggttcacagactgctgcttgtgtgttgccggccaggaattccaggctcacaaggctatcttagcagctcgttctccggtttttagtgccatgtttgaacatgaaatggaggagagcaaaaagaatcgagttgaaatcaatgatgtggagcctgaagtttttaaggaaatgatgtgcttcatttacacggggaaggctccaaacctcgacaaaatggctgatgatttgctggcagctgctgacaagtatgccctggagcgcttaaaggtcatgtgtgaggatgccctctgcagtaacctgtccgtggagaacgctgcagaaattctcatcctggccgacctccacagtgcagatcagttgaaaactcaggcagtggatttcatcaactatcatgcttcggatgtcttggagacctctgggtggaagtcaatggtggtgtcacatccccacttggtggctgaggcataccgctctctggcttcagcacagtgcccttttctgggacccccacgcaaacgcctgaagcaatccggcagcggcagcccggcggcgaaacgcgtgaaactggat

SEQ ID NO: 1756 - DNA, 891 bp, synthetic construct
  source 1..891: mol_type = other DNA; note = TCF4-(GS)5-SPOP-NLS nucleic acid
atggatgacctaggcgccaacgacgaactgatttccttcaaagacgagggcgaacaggaggagaagagctccgaaaactcctcggcagagagggatttagctgatgtcaaatcgtctctagtcaatgaatcagaaacgggcagcggcagcggcagcggcagcggcagcaacgggcttctccctgatgacaagcttaccctcttctgcgaggtgagtgttgtgcaagattctgtcaacatttctggccagaataccatgaacatggtaaaggttcctgagtgccggctggcagatgagttaggaggactgtgggagaattcccggttcacagactgctgcttgtgtgttgccggccaggaattccaggctcacaaggctatcttagcagctcgttctccggtttttagtgccatgtttgaacatgaaatggaggagagcaaaaagaatcgagttgaaatcaatgatgtggagcctgaagtttttaaggaaatgatgtgcttcatttacacggggaaggctccaaacctcgacaaaatggctgatgatttgctggcagctgctgacaagtatgccctggagcgcttaaaggtcatgtgtgaggatgccctctgcagtaacctgtccgtggagaacgctgcagaaattctcatcctggccgacctccacagtgcagatcagttgaaaactcaggcagtggatttcatcaactatcatgcttcggatgtcttggagacctctgggtggaagtcaatggtggtgtcacatccccacttggtggctgaggcataccgctctctggcttcagcacagtgcccttttctgggacccccacgcaaacgcctgaagcaatccggcagcggcagcccggcggcgaaacgcgtgaaactggat

SEQ ID NO: 1757 - DNA, 897 bp, synthetic construct
  source 1..897: mol_type = other DNA; note = TCF4-(GS)6-SPOP-NLS nucleic acid
atggatgacctaggcgccaacgacgaactgatttccttcaaagacgagggcgaacaggaggagaagagctccgaaaactcctcggcagagagggatttagctgatgtcaaatcgtctctagtcaatgaatcagaaacgggcagcggcagcggcagcggcagcggcagcggcagcaacgggcttctccctgatgacaagcttaccctcttctgcgaggtgagtgttgtgcaagattctgtcaacatttctggccagaataccatgaacatggtaaaggttcctgagtgccggctggcagatgagttaggaggactgtgggagaattcccggttcacagactgctgcttgtgtgttgccggccaggaattccaggctcacaaggctatcttagcagctcgttctccggtttttagtgccatgtttgaacatgaaatggaggagagcaaaaagaatcgagttgaaatcaatgatgtggagcctgaagtttttaaggaaatgatgtgcttcatttacacggggaaggctccaaacctcgacaaaatggctgatgatttgctggcagctgctgacaagtatgccctggagcgcttaaaggtcatgtgtgaggatgccctctgcagtaacctgtccgtggagaacgctgcagaaattctcatcctggccgacctccacagtgcagatcagttgaaaactcaggcagtggatttcatcaactatcatgcttcggatgtcttggagacctctgggtggaagtcaatggtggtgtcacatccccacttggtggctgaggcataccgctctctggcttcagcacagtgcccttttctgggacccccacgcaaacgcctgaagcaatccggcagcggcagcccggcggcgaaacgcgtgaaactggat

SEQ ID NO: 1758 - DNA, 897 bp, synthetic construct
  source 1..897: mol_type = other DNA; note = TCF4-(GS)1-SPOP-NLS-HA nucleic acid
atggatgacctaggcgccaacgacgaactgatttccttcaaagacgagggcgaacaggaggagaagagctccgaaaactcctcggcagagagggatttagctgatgtcaaatcgtctctagtcaatgaatcagaaacgggcagcaacgggcttctccctgatgacaagcttaccctcttctgcgaggtgagtgttgtgcaagattctgtcaacatttctggccagaataccatgaacatggtaaaggttcctgagtgccggctggcagatgagttaggaggactgtgggagaattcccggttcacagactgctgcttgtgtgttgccggccaggaattccaggctcacaaggctatcttagcagctcgttctccggtttttagtgccatgtttgaacatgaaatggaggagagcaaaaagaatcgagttgaaatcaatgatgtggagcctgaagtttttaaggaaatgatgtgcttcatttacacggggaaggctccaaacctcgacaaaatggctgatgatttgctggcagctgctgacaagtatgccctggagcgcttaaaggtcatgtgtgaggatgccctctgcagtaacctgtccgtggagaacgctgcagaaattctcatcctggccgacctccacagtgcagatcagttgaaaactcaggcagtggatttcatcaactatcatgcttcggatgtcttggagacctctgggtggaagtcaatggtggtgtcacatccccacttggtggctgaggcataccgctctctggcttcagcacagtgcccttttctgggacccccacgcaaacgcctgaagcaatccggcagcggcagcccggcggcgaaacgcgtgaaactggattacccatacgatgttccagattacgcttaa

SEQ ID NO: 1759 - DNA, 903 bp, synthetic construct
  source 1..903: mol_type = other DNA; note = TCF4-(GS)2-SPOP-NLS-HA nucleic acid
atggatgacctaggcgccaacgacgaactgatttccttcaaagacgagggcgaacaggaggagaagagctccgaaaactcctcggcagagagggatttagctgatgtcaaatcgtctctagtcaatgaatcagaaacgggcagcggcagcaacgggcttctccctgatgacaagcttaccctcttctgcgaggtgagtgttgtgcaagattctgtcaacatttctggccagaataccatgaacatggtaaaggttcctgagtgccggctggcagatgagttaggaggactgtgggagaattcccggttcacagactgctgcttgtgtgttgccggccaggaattccaggctcacaaggctatcttagcagctcgttctccggtttttagtgccatgtttgaacatgaaatggaggagagcaaaaagaatcgagttgaaatcaatgatgtggagcctgaagtttttaaggaaatgatgtgcttcatttacacggggaaggctccaaacctcgacaaaatggctgatgatttgctggcagctgctgacaagtatgccctggagcgcttaaaggtcatgtgtgaggatgccctctgcagtaacctgtccgtggagaacgctgcagaaattctcatcctggccgacctccacagtgcagatcagttgaaaactcaggcagtggatttcatcaactatcatgcttcggatgtcttggagacctctgggtggaagtcaatggtggtgtcacatccccacttggtggctgaggcataccgctctctggcttcagcacagtgcccttttctgggacccccacgcaaacgcctgaagcaatccggcagcggcagcccggcggcgaaacgcgtgaaactggattacccatacgatgttccagattacgcttaa

SEQ ID NO: 1760 - DNA, 909 bp, synthetic construct
  source 1..909: mol_type = other DNA; note = TCF4-(GS)3-SPOP-NLS-HA nucleic acid
atggatgacctaggcgccaacgacgaactgatttccttcaaagacgagggcgaacaggaggagaagagctccgaaaactcctcggcagagagggatttagctgatgtcaaatcgtctctagtcaatgaatcagaaacgggcagcggcagcggcagcaacgggcttctccctgatgacaagcttaccctcttctgcgaggtgagtgttgtgcaagattctgtcaacatttctggccagaataccatgaacatggtaaaggttcctgagtgccggctggcagatgagttaggaggactgtgggagaattcccggttcacagactgctgcttgtgtgttgccggccaggaattccaggctcacaaggctatcttagcagctcgttctccggtttttagtgccatgtttgaacatgaaatggaggagagcaaaaagaatcgagttgaaatcaatgatgtggagcctgaagtttttaaggaaatgatgtgcttcatttacacggggaaggctccaaacctcgacaaaatggctgatgatttgctggcagctgctgacaagtatgccctggagcgcttaaaggtcatgtgtgaggatgccctctgcagtaacctgtccgtggagaacgctgcagaaattctcatcctggccgacctccacagtgcagatcagttgaaaactcaggcagtggatttcatcaactatcatgcttcggatgtcttggagacctctgggtggaagtcaatggtggtgtcacatccccacttggtggctgaggcataccgctctctggcttcagcacagtgcccttttctgggacccccacgcaaacgcctgaagcaatccggcagcggcagcccggcggcgaaacgcgtgaaactggattacccatacgatgttccagattacgcttaa

SEQ ID NO: 1761 - DNA, 915 bp, synthetic construct
  source 1..915: mol_type = other DNA; note = TCF4-(GS)4-SPOP-NLS-HA nucleic acid
atggatgacctaggcgccaacgacgaactgatttccttcaaagacgagggcgaacaggaggagaagagctccgaaaactcctcggcagagagggatttagctgatgtcaaatcgtctctagtcaatgaatcagaaacgggcagcggcagcggcagcggcagcaacgggcttctccctgatgacaagcttaccctcttctgcgaggtgagtgttgtgcaagattctgtcaacatttctggccagaataccatgaacatggtaaaggttcctgagtgccggctggcagatgagttaggaggactgtgggagaattcccggttcacagactgctgcttgtgtgttgccggccaggaattccaggctcacaaggctatcttagcagctcgttctccggtttttagtgccatgtttgaacatgaaatggaggagagcaaaaagaatcgagttgaaatcaatgatgtggagcctgaagtttttaaggaaatgatgtgcttcatttacacggggaaggctccaaacctcgacaaaatggctgatgatttgctggcagctgctgacaagtatgccctggagcgcttaaaggtcatgtgtgaggatgccctctgcagtaacctgtccgtggagaacgctgcagaaattctcatcctggccgacctccacagtgcagatcagttgaaaactcaggcagtggatttcatcaactatcatgcttcggatgtcttggagacctctgggtggaagtcaatggtggtgtcacatccccacttggtggctgaggcataccgctctctggcttcagcacagtgcccttttctgggacccccacgcaaacgcctgaagcaatccggcagcggcagcccggcggcgaaacgcgtgaaactggattacccatacgatgttccagattacgcttaa

SEQ ID NO: 1762 - DNA, 921 bp, synthetic construct
  source 1..921: mol_type = other DNA; note = TCF4-(GS)5-SPOP-NLS-HA nucleic acid
atggatgacctaggcgccaacgacgaactgatttccttcaaagacgagggcgaacaggaggagaagagctccgaaaactcctcggcagagagggatttagctgatgtcaaatcgtctctagtcaatgaatcagaaacgggcagcggcagcggcagcggcagcggcagcaacgggcttctccctgatgacaagcttaccctcttctgcgaggtgagtgttgtgcaagattctgtcaacatttctggccagaataccatgaacatggtaaaggttcctgagtgccggctggcagatgagttaggaggactgtgggagaattcccggttcacagactgctgcttgtgtgttgccggccaggaattccaggctcacaaggctatcttagcagctcgttctccggtttttagtgccatgtttgaacatgaaatggaggagagcaaaaagaatcgagttgaaatcaatgatgtggagcctgaagtttttaaggaaatgatgtgcttcatttacacggggaaggctccaaacctcgacaaaatggctgatgatttgctggcagctgctgacaagtatgccctggagcgcttaaaggtcatgtgtgaggatgccctctgcagtaacctgtccgtggagaacgctgcagaaattctcatcctggccgacctccacagtgcagatcagttgaaaactcaggcagtggatttcatcaactatcatgcttcggatgtcttggagacctctgggtggaagtcaatggtggtgtcacatccccacttggtggctgaggcataccgctctctggcttcagcacagtgcccttttctgggacccccacgcaaacgcctgaagcaatccggcagcggcagcccggcggcgaaacgcgtgaaactggattacccatacgatgttccagattacgcttaa

SEQ ID NO: 1763 - DNA, 927 bp, synthetic construct
  source 1..927: mol_type = other DNA; note = TCF4-(GS)6-SPOP-NLS-HA nucleic acid
atggatgacctaggcgccaacgacgaactgatttccttcaaagacgagggcgaacaggaggagaagagctccgaaaactcctcggcagagagggatttagctgatgtcaaatcgtctctagtcaatgaatcagaaacgggcagcggcagcggcagcggcagcggcagcggcagcaacgggcttctccctgatgacaagcttaccctcttctgcgaggtgagtgttgtgcaagattctgtcaacatttctggccagaataccatgaacatggtaaaggttcctgagtgccggctggcagatgagttaggaggactgtgggagaattcccggttcacagactgctgcttgtgtgttgccggccaggaattccaggctcacaaggctatcttagcagctcgttctccggtttttagtgccatgtttgaacatgaaatggaggagagcaaaaagaatcgagttgaaatcaatgatgtggagcctgaagtttttaaggaaatgatgtgcttcatttacacggggaaggctccaaacctcgacaaaatggctgatgatttgctggcagctgctgacaagtatgccctggagcgcttaaaggtcatgtgtgaggatgccctctgcagtaacctgtccgtggagaacgctgcagaaattctcatcctggccgacctccacagtgcagatcagttgaaaactcaggcagtggatttcatcaactatcatgcttcggatgtcttggagacctctgggtggaagtcaatggtggtgtcacatccccacttggtggctgaggcataccgctctctggcttcagcacagtgcccttttctgggacccccacgcaaacgcctgaagcaatccggcagcggcagcccggcggcgaaacgcgtgaaactggattacccatacgatgttccagattacgcttaa

SEQ ID NO: 1764 - DNA, 684 bp, synthetic construct
  source 1..684: mol_type = other DNA; note = TCF4-(GS)1-CHIP nucleic acid
atggatgacctaggcgccaacgacgaactgatttccttcaaagacgagggcgaacaggaggagaagagctccgaaaactcctcggcagagagggatttagctgatgtcaaatcgtctctagtcaatgaatcagaaacgggcagccggctgaacttcggggacgacatccccagcgctcttcgaatcgcgaagaagaagcgctggaacagcattgaggagcggcgcatccaccaggagagcgagctgcactcctacctctccaggctcattgccgcggagcgtgagagggagctggaagagtgccagcgaaaccacgagggtgatgaggacgacagccacgtccgggcccagcaggcctgcattgaggccaagcacgacaagtacatggcggacatggacgagcttttttctcaggtggatgagaagaggaagaagcgagacatccccgactacctgtgtggcaagatcagctttgagctgatgcgggagccgtgcatcacgcccagtggcatcacctacgaccgcaaggacatcgaggagcacctgcagcgtgtgggtcattttgacccggtgaccaggagccccctgacccaggaacagctcatccccaacttggctatgaaggaggttattgacgcattcatctctgagaatggctgggtggaggactacggcagcggcagc

SEQ ID NO: 1765 - DNA, 690 bp, synthetic construct
  source 1..690: mol_type = other DNA; note = TCF4-(GS)2-CHIP nucleic acid
atggatgacctaggcgccaacgacgaactgatttccttcaaagacgagggcgaacaggaggagaagagctccgaaaactcctcggcagagagggatttagctgatgtcaaatcgtctctagtcaatgaatcagaaacgggcagcggcagccggctgaacttcggggacgacatccccagcgctcttcgaatcgcgaagaagaagcgctggaacagcattgaggagcggcgcatccaccaggagagcgagctgcactcctacctctccaggctcattgccgcggagcgtgagagggagctggaagagtgccagcgaaaccacgagggtgatgaggacgacagccacgtccgggcccagcaggcctgcattgaggccaagcacgacaagtacatggcggacatggacgagcttttttctcaggtggatgagaagaggaagaagcgagacatccccgactacctgtgtggcaagatcagctttgagctgatgcgggagccgtgcatcacgcccagtggcatcacctacgaccgcaaggacatcgaggagcacctgcagcgtgtgggtcattttgacccggtgaccaggagccccctgacccaggaacagctcatccccaacttggctatgaaggaggttattgacgcattcatctctgagaatggctgggtggaggactacggcagcggcagc

SEQ ID NO: 1766 - DNA, 696 bp, synthetic construct
  source 1..696: mol_type = other DNA; note = TCF4-(GS)3-CHIP nucleic acid
atggatgacctaggcgccaacgacgaactgatttccttcaaagacgagggcgaacaggaggagaagagctccgaaaactcctcggcagagagggatttagctgatgtcaaatcgtctctagtcaatgaatcagaaacgggcagcggcagcggcagccggctgaacttcggggacgacatccccagcgctcttcgaatcgcgaagaagaagcgctggaacagcattgaggagcggcgcatccaccaggagagcgagctgcactcctacctctccaggctcattgccgcggagcgtgagagggagctggaagagtgccagcgaaaccacgagggtgatgaggacgacagccacgtccgggcccagcaggcctgcattgaggccaagcacgacaagtacatggcggacatggacgagcttttttctcaggtggatgagaagaggaagaagcgagacatccccgactacctgtgtggcaagatcagctttgagctgatgcgggagccgtgcatcacgcccagtggcatcacctacgaccgcaaggacatcgaggagcacctgcagcgtgtgggtcattttgacccggtgaccaggagccccctgacccaggaacagctcatccccaacttggctatgaaggaggttattgacgcattcatctctgagaatggctgggtggaggactacggcagcggcagc

SEQ ID NO: 1767 - DNA, 702 bp, synthetic construct
  source 1..702: mol_type = other DNA; note = TCF4-(GS)4-CHIP nucleic acid
atggatgacctaggcgccaacgacgaactgatttccttcaaagacgagggcgaacaggaggagaagagctccgaaaactcctcggcagagagggatttagctgatgtcaaatcgtctctagtcaatgaatcagaaacgggcagcggcagcggcagcggcagccggctgaacttcggggacgacatccccagcgctcttcgaatcgcgaagaagaagcgctggaacagcattgaggagcggcgcatccaccaggagagcgagctgcactcctacctctccaggctcattgccgcggagcgtgagagggagctggaagagtgccagcgaaaccacgagggtgatgaggacgacagccacgtccgggcccagcaggcctgcattgaggccaagcacgacaagtacatggcggacatggacgagcttttttctcaggtggatgagaagaggaagaagcgagacatccccgactacctgtgtggcaagatcagctttgagctgatgcgggagccgtgcatcacgcccagtggcatcacctacgaccgcaaggacatcgaggagcacctgcagcgtgtgggtcattttgacccggtgaccaggagccccctgacccaggaacagctcatccccaacttggctatgaaggaggttattgacgcattcatctctgagaatggctgggtggaggactacggcagcggcagc

SEQ ID NO: 1768 - DNA, 708 bp, synthetic construct
  source 1..708: mol_type = other DNA; note = TCF4-(GS)5-CHIP nucleic acid
atggatgacctaggcgccaacgacgaactgatttccttcaaagacgagggcgaacaggaggagaagagctccgaaaactcctcggcagagagggatttagctgatgtcaaatcgtctctagtcaatgaatcagaaacgggcagcggcagcggcagcggcagcggcagccggctgaacttcggggacgacatccccagcgctcttcgaatcgcgaagaagaagcgctggaacagcattgaggagcggcgcatccaccaggagagcgagctgcactcctacctctccaggctcattgccgcggagcgtgagagggagctggaagagtgccagcgaaaccacgagggtgatgaggacgacagccacgtccgggcccagcaggcctgcattgaggccaagcacgacaagtacatggcggacatggacgagcttttttctcaggtggatgagaagaggaagaagcgagacatccccgactacctgtgtggcaagatcagctttgagctgatgcgggagccgtgcatcacgcccagtggcatcacctacgaccgcaaggacatcgaggagcacctgcagcgtgtgggtcattttgacccggtgaccaggagccccctgacccaggaacagctcatccccaacttggctatgaaggaggttattgacgcattcatctctgagaatggctgggtggaggactacggcagcggcagc

SEQ ID NO: 1769 - DNA, 714 bp, synthetic construct
  source 1..714: mol_type = other DNA; note = TCF4-(GS)6-CHIP nucleic acid
atggatgacctaggcgccaacgacgaactgatttccttcaaagacgagggcgaacaggaggagaagagctccgaaaactcctcggcagagagggatttagctgatgtcaaatcgtctctagtcaatgaatcagaaacgggcagcggcagcggcagcggcagcggcagcggcagccggctgaacttcggggacgacatccccagcgctcttcgaatcgcgaagaagaagcgctggaacagcattgaggagcggcgcatccaccaggagagcgagctgcactcctacctctccaggctcattgccgcggagcgtgagagggagctggaagagtgccagcgaaaccacgagggtgatgaggacgacagccacgtccgggcccagcaggcctgcattgaggccaagcacgacaagtacatggcggacatggacgagcttttttctcaggtggatgagaagaggaagaagcgagacatccccgactacctgtgtggcaagatcagctttgagctgatgcgggagccgtgcatcacgcccagtggcatcacctacgaccgcaaggacatcgaggagcacctgcagcgtgtgggtcattttgacccggtgaccaggagccccctgacccaggaacagctcatccccaacttggctatgaaggaggttattgacgcattcatctctgagaatggctgggtggaggactacggcagcggcagc

SEQ ID NO: 1770 - DNA, 714 bp, synthetic construct
  source 1..714: mol_type = other DNA; note = TCF4-(GS)1-CHIP-HA nucleic acid
atggatgacctaggcgccaacgacgaactgatttccttcaaagacgagggcgaacaggaggagaagagctccgaaaactcctcggcagagagggatttagctgatgtcaaatcgtctctagtcaatgaatcagaaacgggcagccggctgaacttcggggacgacatccccagcgctcttcgaatcgcgaagaagaagcgctggaacagcattgaggagcggcgcatccaccaggagagcgagctgcactcctacctctccaggctcattgccgcggagcgtgagagggagctggaagagtgccagcgaaaccacgagggtgatgaggacgacagccacgtccgggcccagcaggcctgcattgaggccaagcacgacaagtacatggcggacatggacgagcttttttctcaggtggatgagaagaggaagaagcgagacatccccgactacctgtgtggcaagatcagctttgagctgatgcgggagccgtgcatcacgcccagtggcatcacctacgaccgcaaggacatcgaggagcacctgcagcgtgtgggtcattttgacccggtgaccaggagccccctgacccaggaacagctcatccccaacttggctatgaaggaggttattgacgcattcatctctgagaatggctgggtggaggactacggcagcggcagctacccatacgatgttccagattacgcttaa

SEQ ID NO: 1771 - DNA, 720 bp, synthetic construct
  source 1..720: mol_type = other DNA; note = TCF4-(GS)2-CHIP-HA nucleic acid
atggatgacctaggcgccaacgacgaactgatttccttcaaagacgagggcgaacaggaggagaagagctccgaaaactcctcggcagagagggatttagctgatgtcaaatcgtctctagtcaatgaatcagaaacgggcagcggcagccggctgaacttcggggacgacatccccagcgctcttcgaatcgcgaagaagaagcgctggaacagcattgaggagcggcgcatccaccaggagagcgagctgcactcctacctctccaggctcattgccgcggagcgtgagagggagctggaagagtgccagcgaaaccacgagggtgatgaggacgacagccacgtccgggcccagcaggcctgcattgaggccaagcacgacaagtacatggcggacatggacgagcttttttctcaggtggatgagaagaggaagaagcgagacatccccgactacctgtgtggcaagatcagctttgagctgatgcgggagccgtgcatcacgcccagtggcatcacctacgaccgcaaggacatcgaggagcacctgcagcgtgtgggtcattttgacccggtgaccaggagccccctgacccaggaacagctcatccccaacttggctatgaaggaggttattgacgcattcatctctgagaatggctgggtggaggactacggcagcggcagctacccatacgatgttccagattacgcttaa

SEQ ID NO: 1772 - DNA, 726 bp, synthetic construct
  source 1..726: mol_type = other DNA; note = TCF4-(GS)3-CHIP-HA nucleic acid
atggatgacctaggcgccaacgacgaactgatttccttcaaagacgagggcgaacaggaggagaagagctccgaaaactcctcggcagagagggatttagctgatgtcaaatcgtctctagtcaatgaatcagaaacgggcagcggcagcggcagccggctgaacttcggggacgacatccccagcgctcttcgaatcgcgaagaagaagcgctggaacagcattgaggagcggcgcatccaccaggagagcgagctgcactcctacctctccaggctcattgccgcggagcgtgagagggagctggaagagtgccagcgaaaccacgagggtgatgaggacgacagccacgtccgggcccagcaggcctgcattgaggccaagcacgacaagtacatggcggacatggacgagcttttttctcaggtggatgagaagaggaagaagcgagacatccccgactacctgtgtggcaagatcagctttgagctgatgcgggagccgtgcatcacgcccagtggcatcacctacgaccgcaaggacatcgaggagcacctgcagcgtgtgggtcattttgacccggtgaccaggagccccctgacccaggaacagctcatccccaacttggctatgaaggaggttattgacgcattcatctctgagaatggctgggtggaggactacggcagcggcagctacccatacgatgttccagattacgcttaa

SEQ ID NO: 1773 - DNA, 732 bp, synthetic construct
  source 1..732: mol_type = other DNA; note = TCF4-(GS)4-CHIP-HA nucleic acid
atggatgacctaggcgccaacgacgaactgatttccttcaaagacgagggcgaacaggaggagaagagctccgaaaactcctcggcagagagggatttagctgatgtcaaatcgtctctagtcaatgaatcagaaacgggcagcggcagcggcagcggcagccggctgaacttcggggacgacatccccagcgctcttcgaatcgcgaagaagaagcgctggaacagcattgaggagcggcgcatccaccaggagagcgagctgcactcctacctctccaggctcattgccgcggagcgtgagagggagctggaagagtgccagcgaaaccacgagggtgatgaggacgacagccacgtccgggcccagcaggcctgcattgaggccaagcacgacaagtacatggcggacatggacgagcttttttctcaggtggatgagaagaggaagaagcgagacatccccgactacctgtgtggcaagatcagctttgagctgatgcgggagccgtgcatcacgcccagtggcatcacctacgaccgcaaggacatcgaggagcacctgcagcgtgtgggtcattttgacccggtgaccaggagccccctgacccaggaacagctcatccccaacttggctatgaaggaggttattgacgcattcatctctgagaatggctgggtggaggactacggcagcggcagctacccatacgatgttccagattacgcttaa

SEQ ID NO: 1774 - DNA, 738 bp, synthetic construct
  source 1..738: mol_type = other DNA; note = TCF4-(GS)5-CHIP-HA nucleic acid
atggatgacctaggcgccaacgacgaactgatttccttcaaagacgagggcgaacaggaggagaagagctccgaaaactcctcggcagagagggatttagctgatgtcaaatcgtctctagtcaatgaatcagaaacgggcagcggcagcggcagcggcagcggcagccggctgaacttcggggacgacatccccagcgctcttcgaatcgcgaagaagaagcgctggaacagcattgaggagcggcgcatccaccaggagagcgagctgcactcctacctctccaggctcattgccgcggagcgtgagagggagctggaagagtgccagcgaaaccacgagggtgatgaggacgacagccacgtccgggcccagcaggcctgcattgaggccaagcacgacaagtacatggcggacatggacgagcttttttctcaggtggatgagaagaggaagaagcgagacatccccgactacctgtgtggcaagatcagctttgagctgatgcgggagccgtgcatcacgcccagtggcatcacctacgaccgcaaggacatcgaggagcacctgcagcgtgtgggtcattttgacccggtgaccaggagccccctgacccaggaacagctcatccccaacttggctatgaaggaggttattgacgcattcatctctgagaatggctgggtggaggactacggcagcggcagctacccatacgatgttccagattacgcttaa

SEQ ID NO: 1775 - DNA, 744 bp, synthetic construct
  source 1..744: mol_type = other DNA; note = TCF4-(GS)6-CHIP-HA nucleic acid
atggatgacctaggcgccaacgacgaactgatttccttcaaagacgagggcgaacaggaggagaagagctccgaaaactcctcggcagagagggatttagctgatgtcaaatcgtctctagtcaatgaatcagaaacgggcagcggcagcggcagcggcagcggcagcggcagccggctgaacttcggggacgacatccccagcgctcttcgaatcgcgaagaagaagcgctggaacagcattgaggagcggcgcatccaccaggagagcgagctgcactcctacctctccaggctcattgccgcggagcgtgagagggagctggaagagtgccagcgaaaccacgagggtgatgaggacgacagccacgtccgggcccagcaggcctgcattgaggccaagcacgacaagtacatggcggacatggacgagcttttttctcaggtggatgagaagaggaagaagcgagacatccccgactacctgtgtggcaagatcagctttgagctgatgcgggagccgtgcatcacgcccagtggcatcacctacgaccgcaaggacatcgaggagcacctgcagcgtgtgggtcattttgacccggtgaccaggagccccctgacccaggaacagctcatccccaacttggctatgaaggaggttattgacgcattcatctctgagaatggctgggtggaggactacggcagcggcagctacccatacgatgttccagattacgcttaa

SEQ ID NO: 1776 - DNA, 249 bp, synthetic construct
  source 1..249: mol_type = other DNA; note = DCAF1-(GS)1-TCF4 nucleic acid
caggcgccgattaactttaccagccgcctgaaccgccgcgcgagctttccgaaatatggcggcgtggatggcggctgctttgatcgccatctgatttttagccgcggcagcgatgacctaggcgccaacgacgaactgatttccttcaaagacgagggcgaacaggaggagaagagctccgaaaactcctcggcagagagggatttagctgatgtcaaatcgtctctagtcaatgaatcagaaacgtaa

SEQ ID NO: 1777 - DNA, 255 bp, synthetic construct
  source 1..255: mol_type = other DNA; note = DCAF1-(GS)2-TCF4 nucleic acid
caggcgccgattaactttaccagccgcctgaaccgccgcgcgagctttccgaaatatggcggcgtggatggcggctgctttgatcgccatctgatttttagccgcggcagcggcagcgatgacctaggcgccaacgacgaactgatttccttcaaagacgagggcgaacaggaggagaagagctccgaaaactcctcggcagagagggatttagctgatgtcaaatcgtctctagtcaatgaatcagaaacgtaa

SEQ ID NO: 1778 - DNA, 261 bp, synthetic construct
  source 1..261: mol_type = other DNA; note = DCAF1-(GS)3-TCF4 nucleic acid
caggcgccgattaactttaccagccgcctgaaccgccgcgcgagctttccgaaatatggcggcgtggatggcggctgctttgatcgccatctgatttttagccgcggcagcggcagcggcagcgatgacctaggcgccaacgacgaactgatttccttcaaagacgagggcgaacaggaggagaagagctccgaaaactcctcggcagagagggatttagctgatgtcaaatcgtctctagtcaatgaatcagaaacgtaa

SEQ ID NO: 1779 - DNA, 267 bp, synthetic construct
  source 1..267: mol_type = other DNA; note = DCAF1-(GS)4-TCF4 nucleic acid
caggcgccgattaactttaccagccgcctgaaccgccgcgcgagctttccgaaatatggcggcgtggatggcggctgctttgatcgccatctgatttttagccgcggcagcggcagcggcagcggcagcgatgacctaggcgccaacgacgaactgatttccttcaaagacgagggcgaacaggaggagaagagctccgaaaactcctcggcagagagggatttagctgatgtcaaatcgtctctagtcaatgaatcagaaacgtaa

SEQ ID NO: 1780 - DNA, 273 bp, synthetic construct
  source 1..273: mol_type = other DNA; note = DCAF1-(GS)5-TCF4 nucleic acid
caggcgccgattaactttaccagccgcctgaaccgccgcgcgagctttccgaaatatggcggcgtggatggcggctgctttgatcgccatctgatttttagccgcggcagcggcagcggcagcggcagcggcagcgatgacctaggcgccaacgacgaactgatttccttcaaagacgagggcgaacaggaggagaagagctccgaaaactcctcggcagagagggatttagctgatgtcaaatcgtctctagtcaatgaatcagaaacgtaa

SEQ ID NO: 1781 - DNA, 279 bp, synthetic construct
  source 1..279: mol_type = other DNA; note = DCAF1-(GS)6-TCF4 nucleic acid
caggcgccgattaactttaccagccgcctgaaccgccgcgcgagctttccgaaatatggcggcgtggatggcggctgctttgatcgccatctgatttttagccgcggcagcggcagcggcagcggcagcggcagcggcagcgatgacctaggcgccaacgacgaactgatttccttcaaagacgagggcgaacaggaggagaagagctccgaaaactcctcggcagagagggatttagctgatgtcaaatcgtctctagtcaatgaatcagaaacgtaa

SEQ ID NO: 1782 - DNA, 297 bp, synthetic construct
  source 1..297: mol_type = other DNA; note = HA-DCAF1-(GS)1-TCF4 nucleic acid
atgtacccatacgatgttccagattacgctggcagcggcagcggcagccaggcgccgattaactttaccagccgcctgaaccgccgcgcgagctttccgaaatatggcggcgtggatggcggctgctttgatcgccatctgatttttagccgcggcagcgatgacctaggcgccaacgacgaactgatttccttcaaagacgagggcgaacaggaggagaagagctccgaaaactcctcggcagagagggatttagctgatgtcaaatcgtctctagtcaatgaatcagaaacgtaa

SEQ ID NO: 1783 - DNA, 303 bp, synthetic construct
  source 1..303: mol_type = other DNA; note = HA-DCAF1-(GS)2-TCF4 nucleic acid
atgtacccatacgatgttccagattacgctggcagcggcagcggcagccaggcgccgattaactttaccagccgcctgaaccgccgcgcgagctttccgaaatatggcggcgtggatggcggctgctttgatcgccatctgatttttagccgcggcagcggcagcgatgacctaggcgccaacgacgaactgatttccttcaaagacgagggcgaacaggaggagaagagctccgaaaactcctcggcagagagggatttagctgatgtcaaatcgtctctagtcaatgaatcagaaacgtaa

SEQ ID NO: 1784 - DNA, 309 bp, synthetic construct
  source 1..309: mol_type = other DNA; note = HA-DCAF1-(GS)3-TCF4 nucleic acid
atgtacccatacgatgttccagattacgctggcagcggcagcggcagccaggcgccgattaactttaccagccgcctgaaccgccgcgcgagctttccgaaatatggcggcgtggatggcggctgctttgatcgccatctgatttttagccgcggcagcggcagcggcagcgatgacctaggcgccaacgacgaactgatttccttcaaagacgagggcgaacaggaggagaagagctccgaaaactcctcggcagagagggatttagctgatgtcaaatcgtctctagtcaatgaatcagaaacgtaa

SEQ ID NO: 1785 - DNA, 315 bp, synthetic construct
  source 1..315: mol_type = other DNA; note = HA-DCAF1-(GS)4-TCF4 nucleic acid
atgtacccatacgatgttccagattacgctggcagcggcagcggcagccaggcgccgattaactttaccagccgcctgaaccgccgcgcgagctttccgaaatatggcggcgtggatggcggctgctttgatcgccatctgatttttagccgcggcagcggcagcggcagcggcagcgatgacctaggcgccaacgacgaactgatttccttcaaagacgagggcgaacaggaggagaagagctccgaaaactcctcggcagagagggatttagctgatgtcaaatcgtctctagtcaatgaatcagaaacgtaa

SEQ ID NO: 1786 - DNA, 321 bp, synthetic construct
  source 1..321: mol_type = other DNA; note = HA-DCAF1-(GS)5-TCF4 nucleic acid
atgtacccatacgatgttccagattacgctggcagcggcagcggcagccaggcgccgattaactttaccagccgcctgaaccgccgcgcgagctttccgaaatatggcggcgtggatggcggctgctttgatcgccatctgatttttagccgcggcagcggcagcggcagcggcagcggcagcgatgacctaggcgccaacgacgaactgatttccttcaaagacgagggcgaacaggaggagaagagctccgaaaactcctcggcagagagggatttagctgatgtcaaatcgtctctagtcaatgaatcagaaacgtaa

SEQ ID NO: 1787 - DNA, 327 bp, synthetic construct
  source 1..327: mol_type = other DNA; note = HA-DCAF1-(GS)6-TCF4 nucleic acid
atgtacccatacgatgttccagattacgctggcagcggcagcggcagccaggcgccgattaactttaccagccgcctgaaccgccgcgcgagctttccgaaatatggcggcgtggatggcggctgctttgatcgccatctgatttttagccgcggcagcggcagcggcagcggcagcggcagcggcagcgatgacctaggcgccaacgacgaactgatttccttcaaagacgagggcgaacaggaggagaagagctccgaaaactcctcggcagagagggatttagctgatgtcaaatcgtctctagtcaatgaatcagaaacgtaa

SEQ ID NO: 1788 - DNA, 1212 bp, synthetic construct
  source 1..1212: mol_type = other DNA; note = TCF4-(GS)1-E6AP nucleic acid
gatgacctaggcgccaacgacgaactgatttccttcaaagacgagggcgaacaggaggagaagagctccgaaaactcctcggcagagagggatttagctgatgtcaaatcgtctctagtcaatgaatcagaaacgggcagcaatccatatttgagactcaaagttagacgtgaccatatcatagatgatgcacttgtccggctagagatgatcgctatggaaaatcctgcagacttgaagaagcagttgtatgtggaatttgaaggagaacaaggagttgatgagggaggtgtttccaaagaattttttcagctggttgtggaggaaatcttcaatccagatattggtatgttcacatacgatgaatctacaaaattgttttggtttaatccatcttcttttgaaactgagggtcagtttactctgattggcatagtactgggtctggctatttacaataactgtatactggatgtacattttcccatggttgtctacaggaagctaatggggaaaaaaggaacttttcgtgacttgggagactctcacccagttctatatcagagtttaaaagatttattggagtatgaagggaatgtggaagatgacatgatgatcactttccagatatcacagacagatctttttggtaacccaatgatgtatgatctaaaggaaaatggtgataaaattccaattacaaatgaaaacaggaaggaatttgtcaatctttattctgactacattctcaataaatcagtagaaaaacagttcaaggcttttcggagaggttttcatatggtgaccaatgaatctcccttaaagtacttattcagaccagaagaaattgaattgcttatatgtggaagccggaatctagatttccaagcactagaagaaactacagaatatgacggtggctataccagggactctgttctgattagggagttctgggaaatcgttcattcatttacagatgaacagaaaagactcttcttgcagtttacaacgggcacagacagagcacctgtgggaggactaggaaaattaaagatgattatagccaaaaatggcccagacacagaaaggttacctacatctcatacttgctttaatgtgcttttacttccggaatactcaagcaaagaaaaacttaaagagagattgttgaaggccatcacgtatgccaaaggatttggcatgctgtaa

SEQ ID NO: 1789 - DNA, 1218 bp, synthetic construct
  source 1..1218: mol_type = other DNA; note = TCF4-(GS)2-E6AP nucleic acid
gatgacctaggcgccaacgacgaactgatttccttcaaagacgagggcgaacaggaggagaagagctccgaaaactcctcggcagagagggatttagctgatgtcaaatcgtctctagtcaatgaatcagaaacgggcagcggcagcaatccatatttgagactcaaagttagacgtgaccatatcatagatgatgcacttgtccggctagagatgatcgctatggaaaatcctgcagacttgaagaagcagttgtatgtggaatttgaaggagaacaaggagttgatgagggaggtgtttccaaagaattttttcagctggttgtggaggaaatcttcaatccagatattggtatgttcacatacgatgaatctacaaaattgttttggtttaatccatcttcttttgaaactgagggtcagtttactctgattggcatagtactgggtctggctatttacaataactgtatactggatgtacattttcccatggttgtctacaggaagctaatggggaaaaaaggaacttttcgtgacttgggagactctcacccagttctatatcagagtttaaaagatttattggagtatgaagggaatgtggaagatgacatgatgatcactttccagatatcacagacagatctttttggtaacccaatgatgtatgatctaaaggaaaatggtgataaaattccaattacaaatgaaaacaggaaggaatttgtcaatctttattctgactacattctcaataaatcagtagaaaaacagttcaaggcttttcggagaggttttcatatggtgaccaatgaatctcccttaaagtacttattcagaccagaagaaattgaattgcttatatgtggaagccggaatctagatttccaagcactagaagaaactacagaatatgacggtggctataccagggactctgttctgattagggagttctgggaaatcgttcattcatttacagatgaacagaaaagactcttcttgcagtttacaacgggcacagacagagcacctgtgggaggactaggaaaattaaagatgattatagccaaaaatggcccagacacagaaaggttacctacatctcatacttgctttaatgtgcttttacttccggaatactcaagcaaagaaaaacttaaagagagattgttgaaggccatcacgtatgccaaaggatttggcatgctgtaa

SEQ ID NO: 1790 - DNA, 1224 bp, synthetic construct
  source 1..1224: mol_type = other DNA; note = TCF4-(GS)3-E6AP nucleic acid
gatgacctaggcgccaacgacgaactgatttccttcaaagacgagggcgaacaggaggagaagagctccgaaaactcctcggcagagagggatttagctgatgtcaaatcgtctctagtcaatgaatcagaaacgggcagcggcagcggcagcaatccatatttgagactcaaagttagacgtgaccatatcatagatgatgcacttgtccggctagagatgatcgctatggaaaatcctgcagacttgaagaagcagttgtatgtggaatttgaaggagaacaaggagttgatgagggaggtgtttccaaagaattttttcagctggttgtggaggaaatcttcaatccagatattggtatgttcacatacgatgaatctacaaaattgttttggtttaatccatcttcttttgaaactgagggtcagtttactctgattggcatagtactgggtctggctatttacaataactgtatactggatgtacattttcccatggttgtctacaggaagctaatggggaaaaaaggaacttttcgtgacttgggagactctcacccagttctatatcagagtttaaaagatttattggagtatgaagggaatgtggaagatgacatgatgatcactttccagatatcacagacagatctttttggtaacccaatgatgtatgatctaaaggaaaatggtgataaaattccaattacaaatgaaaacaggaaggaatttgtcaatctttattctgactacattctcaataaatcagtagaaaaacagttcaaggcttttcggagaggttttcatatggtgaccaatgaatctcccttaaagtacttattcagaccagaagaaattgaattgcttatatgtggaagccggaatctagatttccaagcactagaagaaactacagaatatgacggtggctataccagggactctgttctgattagggagttctgggaaatcgttcattcatttacagatgaacagaaaagactcttcttgcagtttacaacgggcacagacagagcacctgtgggaggactaggaaaattaaagatgattatagccaaaaatggcccagacacagaaaggttacctacatctcatacttgctttaatgtgcttttacttccggaatactcaagcaaagaaaaacttaaagagagattgttgaaggccatcacgtatgccaaaggatttggcatgctgtaa

SEQ ID NO: 1791 - DNA, 1230 bp, synthetic construct
  source 1..1230: mol_type = other DNA; note = TCF4-(GS)4-E6AP nucleic acid
gatgacctaggcgccaacgacgaactgatttccttcaaagacgagggcgaacaggaggagaagagctccgaaaactcctcggcagagagggatttagctgatgtcaaatcgtctctagtcaatgaatcagaaacgggcagcggcagcggcagcggcagcaatccatatttgagactcaaagttagacgtgaccatatcatagatgatgcacttgtccggctagagatgatcgctatggaaaatcctgcagacttgaagaagcagttgtatgtggaatttgaaggagaacaaggagttgatgagggaggtgtttccaaagaattttttcagctggttgtggaggaaatcttcaatccagatattggtatgttcacatacgatgaatctacaaaattgttttggtttaatccatcttcttttgaaactgagggtcagtttactctgattggcatagtactgggtctggctatttacaataactgtatactggatgtacattttcccatggttgtctacaggaagctaatggggaaaaaaggaacttttcgtgacttgggagactctcacccagttctatatcagagtttaaaagatttattggagtatgaagggaatgtggaagatgacatgatgatcactttccagatatcacagacagatctttttggtaacccaatgatgtatgatctaaaggaaaatggtgataaaattccaattacaaatgaaaacaggaaggaatttgtcaatctttattctgactacattctcaataaatcagtagaaaaacagttcaaggcttttcggagaggttttcatatggtgaccaatgaatctcccttaaagtacttattcagaccagaagaaattgaattgcttatatgtggaagccggaatctagatttccaagcactagaagaaactacagaatatgacggtggctataccagggactctgttctgattagggagttctgggaaatcgttcattcatttacagatgaacagaaaagactcttcttgcagtttacaacgggcacagacagagcacctgtgggaggactaggaaaattaaagatgattatagccaaaaatggcccagacacagaaaggttacctacatctcatacttgctttaatgtgcttttacttccggaatactcaagcaaagaaaaacttaaagagagattgttgaaggccatcacgtatgccaaaggatttggcatgctgtaa

SEQ ID NO: 1792 - DNA, 1236 bp, synthetic construct
  source 1..1236: mol_type = other DNA; note = TCF4-(GS)5-E6AP nucleic acid
gatgacctaggcgccaacgacgaactgatttccttcaaagacgagggcgaacaggaggagaagagctccgaaaactcctcggcagagagggatttagctgatgtcaaatcgtctctagtcaatgaatcagaaacgggcagcggcagcggcagcggcagcggcagcaatccatatttgagactcaaagttagacgtgaccatatcatagatgatgcacttgtccggctagagatgatcgctatggaaaatcctgcagacttgaagaagcagttgtatgtggaatttgaaggagaacaaggagttgatgagggaggtgtttccaaagaattttttcagctggttgtggaggaaatcttcaatccagatattggtatgttcacatacgatgaatctacaaaattgttttggtttaatccatcttcttttgaaactgagggtcagtttactctgattggcatagtactgggtctggctatttacaataactgtatactggatgtacattttcccatggttgtctacaggaagctaatggggaaaaaaggaacttttcgtgacttgggagactctcacccagttctatatcagagtttaaaagatttattggagtatgaagggaatgtggaagatgacatgatgatcactttccagatatcacagacagatctttttggtaacccaatgatgtatgatctaaaggaaaatggtgataaaattccaattacaaatgaaaacaggaaggaatttgtcaatctttattctgactacattctcaataaatcagtagaaaaacagttcaaggcttttcggagaggttttcatatggtgaccaatgaatctcccttaaagtacttattcagaccagaagaaattgaattgcttatatgtggaagccggaatctagatttccaagcactagaagaaactacagaatatgacggtggctataccagggactctgttctgattagggagttctgggaaatcgttcattcatttacagatgaacagaaaagactcttcttgcagtttacaacgggcacagacagagcacctgtgggaggactaggaaaattaaagatgattatagccaaaaatggcccagacacagaaaggttacctacatctcatacttgctttaatgtgcttttacttccggaatactcaagcaaagaaaaacttaaagagagattgttgaaggccatcacgtatgccaaaggatttggcatgctgtaa

SEQ ID NO: 1793 - DNA, 1242 bp, synthetic construct
  source 1..1242: mol_type = other DNA; note = TCF4-(GS)6-E6AP nucleic acid
gatgacctaggcgccaacgacgaactgatttccttcaaagacgagggcgaacaggaggagaagagctccgaaaactcctcggcagagagggatttagctgatgtcaaatcgtctctagtcaatgaatcagaaacgggcagcggcagcggcagcggcagcggcagcggcagcaatccatatttgagactcaaagttagacgtgaccatatcatagatgatgcacttgtccggctagagatgatcgctatggaaaatcctgcagacttgaagaagcagttgtatgtggaatttgaaggagaacaaggagttgatgagggaggtgtttccaaagaattttttcagctggttgtggaggaaatcttcaatccagatattggtatgttcacatacgatgaatctacaaaattgttttggtttaatccatcttcttttgaaactgagggtcagtttactctgattggcatagtactgggtctggctatttacaataactgtatactggatgtacattttcccatggttgtctacaggaagctaatggggaaaaaaggaacttttcgtgacttgggagactctcacccagttctatatcagagtttaaaagatttattggagtatgaagggaatgtggaagatgacatgatgatcactttccagatatcacagacagatctttttggtaacccaatgatgtatgatctaaaggaaaatggtgataaaattccaattacaaatgaaaacaggaaggaatttgtcaatctttattctgactacattctcaataaatcagtagaaaaacagttcaaggcttttcggagaggttttcatatggtgaccaatgaatctcccttaaagtacttattcagaccagaagaaattgaattgcttatatgtggaagccggaatctagatttccaagcactagaagaaactacagaatatgacggtggctataccagggactctgttctgattagggagttctgggaaatcgttcattcatttacagatgaacagaaaagactcttcttgcagtttacaacgggcacagacagagcacctgtgggaggactaggaaaattaaagatgattatagccaaaaatggcccagacacagaaaggttacctacatctcatacttgctttaatgtgcttttacttccggaatactcaagcaaagaaaaacttaaagagagattgttgaaggccatcacgtatgccaaaggatttggcatgctgtaa

SEQ ID NO: 1794 - DNA, 1260 bp, synthetic construct
  source 1..1260: mol_type = other DNA; note = HA-TCF4-(GS)1-E6AP nucleic acid
atgtacccatacgatgttccagattacgctggcagcggcagcggcagcgatgacctaggcgccaacgacgaactgatttccttcaaagacgagggcgaacaggaggagaagagctccgaaaactcctcggcagagagggatttagctgatgtcaaatcgtctctagtcaatgaatcagaaacgggcagcaatccatatttgagactcaaagttagacgtgaccatatcatagatgatgcacttgtccggctagagatgatcgctatggaaaatcctgcagacttgaagaagcagttgtatgtggaatttgaaggagaacaaggagttgatgagggaggtgtttccaaagaattttttcagctggttgtggaggaaatcttcaatccagatattggtatgttcacatacgatgaatctacaaaattgttttggtttaatccatcttcttttgaaactgagggtcagtttactctgattggcatagtactgggtctggctatttacaataactgtatactggatgtacattttcccatggttgtctacaggaagctaatggggaaaaaaggaacttttcgtgacttgggagactctcacccagttctatatcagagtttaaaagatttattggagtatgaagggaatgtggaagatgacatgatgatcactttccagatatcacagacagatctttttggtaacccaatgatgtatgatctaaaggaaaatggtgataaaattccaattacaaatgaaaacaggaaggaatttgtcaatctttattctgactacattctcaataaatcagtagaaaaacagttcaaggcttttcggagaggttttcatatggtgaccaatgaatctcccttaaagtacttattcagaccagaagaaattgaattgcttatatgtggaagccggaatctagatttccaagcactagaagaaactacagaatatgacggtggctataccagggactctgttctgattagggagttctgggaaatcgttcattcatttacagatgaacagaaaagactcttcttgcagtttacaacgggcacagacagagcacctgtgggaggactaggaaaattaaagatgattatagccaaaaatggcccagacacagaaaggttacctacatctcatacttgctttaatgtgcttttacttccggaatactcaagcaaagaaaaacttaaagagagattgttgaaggccatcacgtatgccaaaggatttggcatgctgtaa

SEQ ID NO: 1795 - DNA, 1266 bp, synthetic construct
  source 1..1266: mol_type = other DNA; note = HA-TCF4-(GS)2-E6AP nucleic acid
atgtacccatacgatgttccagattacgctggcagcggcagcggcagcgatgacctaggcgccaacgacgaactgatttccttcaaagacgagggcgaacaggaggagaagagctccgaaaactcctcggcagagagggatttagctgatgtcaaatcgtctctagtcaatgaatcagaaacgggcagcggcagcaatccatatttgagactcaaagttagacgtgaccatatcatagatgatgcacttgtccggctagagatgatcgctatggaaaatcctgcagacttgaagaagcagttgtatgtggaatttgaaggagaacaaggagttgatgagggaggtgtttccaaagaattttttcagctggttgtggaggaaatcttcaatccagatattggtatgttcacatacgatgaatctacaaaattgttttggtttaatccatcttcttttgaaactgagggtcagtttactctgattggcatagtactgggtctggctatttacaataactgtatactggatgtacattttcccatggttgtctacaggaagctaatggggaaaaaaggaacttttcgtgacttgggagactctcacccagttctatatcagagtttaaaagatttattggagtatgaagggaatgtggaagatgacatgatgatcactttccagatatcacagacagatctttttggtaacccaatgatgtatgatctaaaggaaaatggtgataaaattccaattacaaatgaaaacaggaaggaatttgtcaatctttattctgactacattctcaataaatcagtagaaaaacagttcaaggcttttcggagaggttttcatatggtgaccaatgaatctcccttaaagtacttattcagaccagaagaaattgaattgcttatatgtggaagccggaatctagatttccaagcactagaagaaactacagaatatgacggtggctataccagggactctgttctgattagggagttctgggaaatcgttcattcatttacagatgaacagaaaagactcttcttgcagtttacaacgggcacagacagagcacctgtgggaggactaggaaaattaaagatgattatagccaaaaatggcccagacacagaaaggttacctacatctcatacttgctttaatgtgcttttacttccggaatactcaagcaaagaaaaacttaaagagagattgttgaaggccatcacgtatgccaaaggatttggcatgctgtaa

SEQ ID NO: 1796 - DNA, 1272 bp, synthetic construct
  source 1..1272: mol_type = other DNA; note = HA-TCF4-(GS)3-E6AP nucleic acid
atgtacccatacgatgttccagattacgctggcagcggcagcggcagcgatgacctaggcgccaacgacgaactgatttccttcaaagacgagggcgaacaggaggagaagagctccgaaaactcctcggcagagagggatttagctgatgtcaaatcgtctctagtcaatgaatcagaaacgggcagcggcagcggcagcaatccatatttgagactcaaagttagacgtgaccatatcatagatgatgcacttgtccggctagagatgatcgctatggaaaatcctgcagacttgaagaagcagttgtatgtggaatttgaaggagaacaaggagttgatgagggaggtgtttccaaagaattttttcagctggttgtggaggaaatcttcaatccagatattggtatgttcacatacgatgaatctacaaaattgttttggtttaatccatcttcttttgaaactgagggtcagtttactctgattggcatagtactgggtctggctatttacaataactgtatactggatgtacattttcccatggttgtctacaggaagctaatggggaaaaaaggaacttttcgtgacttgggagactctcacccagttctatatcagagtttaaaagatttattggagtatgaagggaatgtggaagatgacatgatgatcactttccagatatcacagacagatctttttggtaacccaatgatgtatgatctaaaggaaaatggtgataaaattccaattacaaatgaaaacaggaaggaatttgtcaatctttattctgactacattctcaataaatcagtagaaaaacagttcaaggcttttcggagaggttttcatatggtgaccaatgaatctcccttaaagtacttattcagaccagaagaaattgaattgcttatatgtggaagccggaatctagatttccaagcactagaagaaactacagaatatgacggtggctataccagggactctgttctgattagggagttctgggaaatcgttcattcatttacagatgaacagaaaagactcttcttgcagtttacaacgggcacagacagagcacctgtgggaggactaggaaaattaaagatgattatagccaaaaatggcccagacacagaaaggttacctacatctcatacttgctttaatgtgcttttacttccggaatactcaagcaaagaaaaacttaaagagagattgttgaaggccatcacgtatgccaaaggatttggcatgctgtaa

SEQ ID NO: 1797 - DNA, 1278 bp, synthetic construct
  source 1..1278: mol_type = other DNA; note = HA-TCF4-(GS)4-E6AP nucleic acid
atgtacccatacgatgttccagattacgctggcagcggcagcggcagcgatgacctaggcgccaacgacgaactgatttccttcaaagacgagggcgaacaggaggagaagagctccgaaaactcctcggcagagagggatttagctgatgtcaaatcgtctctagtcaatgaatcagaaacgggcagcggcagcggcagcggcagcaatccatatttgagactcaaagttagacgtgaccatatcatagatgatgcacttgtccggctagagatgatcgctatggaaaatcctgcagacttgaagaagcagttgtatgtggaatttgaaggagaacaaggagttgatgagggaggtgtttccaaagaattttttcagctggttgtggaggaaatcttcaatccagatattggtatgttcacatacgatgaatctacaaaattgttttggtttaatccatcttcttttgaaactgagggtcagtttactctgattggcatagtactgggtctggctatttacaataactgtatactggatgtacattttcccatggttgtctacaggaagctaatggggaaaaaaggaacttttcgtgacttgggagactctcacccagttctatatcagagtttaaaagatttattggagtatgaagggaatgtggaagatgacatgatgatcactttccagatatcacagacagatctttttggtaacccaatgatgtatgatctaaaggaaaatggtgataaaattccaattacaaatgaaaacaggaaggaatttgtcaatctttattctgactacattctcaataaatcagtagaaaaacagttcaaggcttttcggagaggttttcatatggtgaccaatgaatctcccttaaagtacttattcagaccagaagaaattgaattgcttatatgtggaagccggaatctagatttccaagcactagaagaaactacagaatatgacggtggctataccagggactctgttctgattagggagttctgggaaatcgttcattcatttacagatgaacagaaaagactcttcttgcagtttacaacgggcacagacagagcacctgtgggaggactaggaaaattaaagatgattatagccaaaaatggcccagacacagaaaggttacctacatctcatacttgctttaatgtgcttttacttccggaatactcaagcaaagaaaaacttaaagagagattgttgaaggccatcacgtatgccaaaggatttggcatgctgtaa

SEQ ID NO: 1798 - DNA, 1284 bp, synthetic construct
  source 1..1284: mol_type = other DNA; note = HA-TCF4-(GS)5-E6AP nucleic acid
atgtacccatacgatgttccagattacgctggcagcggcagcggcagcgatgacctaggcgccaacgacgaactgatttccttcaaagacgagggcgaacaggaggagaagagctccgaaaactcctcggcagagagggatttagctgatgtcaaatcgtctctagtcaatgaatcagaaacgggcagcggcagcggcagcggcagcggcagcaatccatatttgagactcaaagttagacgtgaccatatcatagatgatgcacttgtccggctagagatgatcgctatggaaaatcctgcagacttgaagaagcagttgtatgtggaatttgaaggagaacaaggagttgatgagggaggtgtttccaaagaattttttcagctggttgtggaggaaatcttcaatccagatattggtatgttcacatacgatgaatctacaaaattgttttggtttaatccatcttcttttgaaactgagggtcagtttactctgattggcatagtactgggtctggctatttacaataactgtatactggatgtacattttcccatggttgtctacaggaagctaatggggaaaaaaggaacttttcgtgacttgggagactctcacccagttctatatcagagtttaaaagatttattggagtatgaagggaatgtggaagatgacatgatgatcactttccagatatcacagacagatctttttggtaacccaatgatgtatgatctaaaggaaaatggtgataaaattccaattacaaatgaaaacaggaaggaatttgtcaatctttattctgactacattctcaataaatcagtagaaaaacagttcaaggcttttcggagaggttttcatatggtgaccaatgaatctcccttaaagtacttattcagaccagaagaaattgaattgcttatatgtggaagccggaatctagatttccaagcactagaagaaactacagaatatgacggtggctataccagggactctgttctgattagggagttctgggaaatcgttcattcatttacagatgaacagaaaagactcttcttgcagtttacaacgggcacagacagagcacctgtgggaggactaggaaaattaaagatgattatagccaaaaatggcccagacacagaaaggttacctacatctcatacttgctttaatgtgcttttacttccggaatactcaagcaaagaaaaacttaaagagagattgttgaaggccatcacgtatgccaaaggatttggcatgctgtaa

SEQ ID NO: 1799 - DNA, 1290 bp, synthetic construct
  source 1..1290: mol_type = other DNA; note = HA-TCF4-(GS)6-E6AP nucleic acid
atgtacccatacgatgttccagattacgctggcagcggcagcggcagcgatgacctaggcgccaacgacgaactgatttccttcaaagacgagggcgaacaggaggagaagagctccgaaaactcctcggcagagagggatttagctgatgtcaaatcgtctctagtcaatgaatcagaaacgggcagcggcagcggcagcggcagcggcagcggcagcaatccatatttgagactcaaagttagacgtgaccatatcatagatgatgcacttgtccggctagagatgatcgctatggaaaatcctgcagacttgaagaagcagttgtatgtggaatttgaaggagaacaaggagttgatgagggaggtgtttccaaagaattttttcagctggttgtggaggaaatcttcaatccagatattggtatgttcacatacgatgaatctacaaaattgttttggtttaatccatcttcttttgaaactgagggtcagtttactctgattggcatagtactgggtctggctatttacaataactgtatactggatgtacattttcccatggttgtctacaggaagctaatggggaaaaaaggaacttttcgtgacttgggagactctcacccagttctatatcagagtttaaaagatttattggagtatgaagggaatgtggaagatgacatgatgatcactttccagatatcacagacagatctttttggtaacccaatgatgtatgatctaaaggaaaatggtgataaaattccaattacaaatgaaaacaggaaggaatttgtcaatctttattctgactacattctcaataaatcagtagaaaaacagttcaaggcttttcggagaggttttcatatggtgaccaatgaatctcccttaaagtacttattcagaccagaagaaattgaattgcttatatgtggaagccggaatctagatttccaagcactagaagaaactacagaatatgacggtggctataccagggactctgttctgattagggagttctgggaaatcgttcattcatttacagatgaacagaaaagactcttcttgcagtttacaacgggcacagacagagcacctgtgggaggactaggaaaattaaagatgattatagccaaaaatggcccagacacagaaaggttacctacatctcatacttgctttaatgtgcttttacttccggaatactcaagcaaagaaaaacttaaagagagattgttgaaggccatcacgtatgccaaaggatttggcatgctgtaa

SEQ ID NO: 1800 - DNA, 1005 bp, synthetic construct
  source 1..1005: mol_type = other DNA; note = bTRCP-(GS)1-TCF4 nucleic acid
atggacccggccgaggcggtgctgcaagagaaggcactcaagtttatgtgctctatgcccaggtctctgtggctgggctgctccagcctggcggacagcatgccttcgctgcgatgcctgtataacccagggactggcgcactcacagctttccagaattcctcagagagagaagactgtaataatggcgaaccccctaggaagataataccagagaagaattcacttagacagacatacaacagctgtgccagactctgcttaaaccaagaaacagtatgtttagcaagcactgctatgaagactgagaattgtgtggccaaaacaaaacttgccaatggcacttccagtatgattgtgcccaagcaacggaaactctcagcaagctatgaaaaggaaaaggaactgtgtgtcaaatactttgagcagtggtcagagtcagatcaagtggaatttgtggaacatcttatatcccaaatgtgtcattaccaacatgggcacataaactcgtatcttaaacctatgttgcagagagatttcataactgctctgccagctcggggattggatcatatcgctgagaacattctgtcatacctggatgccaaatcactatgtgctgctgaacttgtgtgcaaggaatggtaccgagtgacctctgatggcatgctgtggaagaagcttatcgagagaatggtcaggacagattctctgtggagaggcctggcagaacgaagaggatggggacagtatttattcaaaaacaaacctcctgacgggaatgctcctcccaactctttttatagagcactttatcctaaaattatacaagacattgagacaatagaatctaattcgagaggcagcgatgacctaggcgccaacgacgaactgatttccttcaaagacgagggcgaacaggaggagaagagctccgaaaactcctcggcagagagggatttagctgatgtcaaatcgtctctagtcaatgaatcagaaacgtaa

SEQ ID NO: 1801 - DNA, 1011 bp, synthetic construct
  source 1..1011: mol_type = other DNA; note = bTRCP-(GS)2-TCF4 nucleic acid
atggacccggccgaggcggtgctgcaagagaaggcactcaagtttatgtgctctatgcccaggtctctgtggctgggctgctccagcctggcggacagcatgccttcgctgcgatgcctgtataacccagggactggcgcactcacagctttccagaattcctcagagagagaagactgtaataatggcgaaccccctaggaagataataccagagaagaattcacttagacagacatacaacagctgtgccagactctgcttaaaccaagaaacagtatgtttagcaagcactgctatgaagactgagaattgtgtggccaaaacaaaacttgccaatggcacttccagtatgattgtgcccaagcaacggaaactctcagcaagctatgaaaaggaaaaggaactgtgtgtcaaatactttgagcagtggtcagagtcagatcaagtggaatttgtggaacatcttatatcccaaatgtgtcattaccaacatgggcacataaactcgtatcttaaacctatgttgcagagagatttcataactgctctgccagctcggggattggatcatatcgctgagaacattctgtcatacctggatgccaaatcactatgtgctgctgaacttgtgtgcaaggaatggtaccgagtgacctctgatggcatgctgtggaagaagcttatcgagagaatggtcaggacagattctctgtggagaggcctggcagaacgaagaggatggggacagtatttattcaaaaacaaacctcctgacgggaatgctcctcccaactctttttatagagcactttatcctaaaattatacaagacattgagacaatagaatctaattcgagaggcagcggcagcgatgacctaggcgccaacgacgaactgatttccttcaaagacgagggcgaacaggaggagaagagctccgaaaactcctcggcagagagggatttagctgatgtcaaatcgtctctagtcaatgaatcagaaacgtaa

SEQ ID NO: 1802 - DNA, 1017 bp, synthetic construct
  source 1..1017: mol_type = other DNA; note = bTRCP-(GS)3-TCF4 nucleic acid
atggacccggccgaggcggtgctgcaagagaaggcactcaagtttatgtgctctatgcccaggtctctgtggctgggctgctccagcctggcggacagcatgccttcgctgcgatgcctgtataacccagggactggcgcactcacagctttccagaattcctcagagagagaagactgtaataatggcgaaccccctaggaagataataccagagaagaattcacttagacagacatacaacagctgtgccagactctgcttaaaccaagaaacagtatgtttagcaagcactgctatgaagactgagaattgtgtggccaaaacaaaacttgccaatggcacttccagtatgattgtgcccaagcaacggaaactctcagcaagctatgaaaaggaaaaggaactgtgtgtcaaatactttgagcagtggtcagagtcagatcaagtggaatttgtggaacatcttatatcccaaatgtgtcattaccaacatgggcacataaactcgtatcttaaacctatgttgcagagagatttcataactgctctgccagctcggggattggatcatatcgctgagaacattctgtcatacctggatgccaaatcactatgtgctgctgaacttgtgtgcaaggaatggtaccgagtgacctctgatggcatgctgtggaagaagcttatcgagagaatggtcaggacagattctctgtggagaggcctggcagaacgaagaggatggggacagtatttattcaaaaacaaacctcctgacgggaatgctcctcccaactctttttatagagcactttatcctaaaattatacaagacattgagacaatagaatctaattcgagaggcagcggcagcggcagcgatgacctaggcgccaacgacgaactgatttccttcaaagacgagggcgaacaggaggagaagagctccgaaaactcctcggcagagagggatttagctgatgtcaaatcgtctctagtcaatgaatcagaaacgtaa

SEQ ID NO: 1803 - DNA, 1023 bp, synthetic construct
  source 1..1023: mol_type = other DNA; note = bTRCP-(GS)4-TCF4 nucleic acid
atggacccggccgaggcggtgctgcaagagaaggcactcaagtttatgtgctctatgcccaggtctctgtggctgggctgctccagcctggcggacagcatgccttcgctgcgatgcctgtataacccagggactggcgcactcacagctttccagaattcctcagagagagaagactgtaataatggcgaaccccctaggaagataataccagagaagaattcacttagacagacatacaacagctgtgccagactctgcttaaaccaagaaacagtatgtttagcaagcactgctatgaagactgagaattgtgtggccaaaacaaaacttgccaatggcacttccagtatgattgtgcccaagcaacggaaactctcagcaagctatgaaaaggaaaaggaactgtgtgtcaaatactttgagcagtggtcagagtcagatcaagtggaatttgtggaacatcttatatcccaaatgtgtcattaccaacatgggcacataaactcgtatcttaaacctatgttgcagagagatttcataactgctctgccagctcggggattggatcatatcgctgagaacattctgtcatacctggatgccaaatcactatgtgctgctgaacttgtgtgcaaggaatggtaccgagtgacctctgatggcatgctgtggaagaagcttatcgagagaatggtcaggacagattctctgtggagaggcctggcagaacgaagaggatggggacagtatttattcaaaaacaaacctcctgacgggaatgctcctcccaactctttttatagagcactttatcctaaaattatacaagacattgagacaatagaatctaattcgagaggcagcggcagcggcagcggcagcgatgacctaggcgccaacgacgaactgatttccttcaaagacgagggcgaacaggaggagaagagctccgaaaactcctcggcagagagggatttagctgatgtcaaatcgtctctagtcaatgaatcagaaacgtaa

SEQ ID NO: 1804 - DNA, 1029 bp, synthetic construct
  source 1..1029: mol_type = other DNA; note = bTRCP-(GS)5-TCF4 nucleic acid
atggacccggccgaggcggtgctgcaagagaaggcactcaagtttatgtgctctatgcccaggtctctgtggctgggctgctccagcctggcggacagcatgccttcgctgcgatgcctgtataacccagggactggcgcactcacagctttccagaattcctcagagagagaagactgtaataatggcgaaccccctaggaagataataccagagaagaattcacttagacagacatacaacagctgtgccagactctgcttaaaccaagaaacagtatgtttagcaagcactgctatgaagactgagaattgtgtggccaaaacaaaacttgccaatggcacttccagtatgattgtgcccaagcaacggaaactctcagcaagctatgaaaaggaaaaggaactgtgtgtcaaatactttgagcagtggtcagagtcagatcaagtggaatttgtggaacatcttatatcccaaatgtgtcattaccaacatgggcacataaactcgtatcttaaacctatgttgcagagagatttcataactgctctgccagctcggggattggatcatatcgctgagaacattctgtcatacctggatgccaaatcactatgtgctgctgaacttgtgtgcaaggaatggtaccgagtgacctctgatggcatgctgtggaagaagcttatcgagagaatggtcaggacagattctctgtggagaggcctggcagaacgaagaggatggggacagtatttattcaaaaacaaacctcctgacgggaatgctcctcccaactctttttatagagcactttatcctaaaattatacaagacattgagacaatagaatctaattcgagaggcagcggcagcggcagcggcagcggcagcgatgacctaggcgccaacgacgaactgatttccttcaaagacgagggcgaacaggaggagaagagctccgaaaactcctcggcagagagggatttagctgatgtcaaatcgtctctagtcaatgaatcagaaacgtaa

SEQ ID NO: 1805 - DNA, 1035 bp, synthetic construct
  source 1..1035: mol_type = other DNA; note = bTRCP-(GS)6-TCF4 nucleic acid
atggacccggccgaggcggtgctgcaagagaaggcactcaagtttatgtgctctatgcccaggtctctgtggctgggctgctccagcctggcggacagcatgccttcgctgcgatgcctgtataacccagggactggcgcactcacagctttccagaattcctcagagagagaagactgtaataatggcgaaccccctaggaagataataccagagaagaattcacttagacagacatacaacagctgtgccagactctgcttaaaccaagaaacagtatgtttagcaagcactgctatgaagactgagaattgtgtggccaaaacaaaacttgccaatggcacttccagtatgattgtgcccaagcaacggaaactctcagcaagctatgaaaaggaaaaggaactgtgtgtcaaatactttgagcagtggtcagagtcagatcaagtggaatttgtggaacatcttatatcccaaatgtgtcattaccaacatgggcacataaactcgtatcttaaacctatgttgcagagagatttcataactgctctgccagctcggggattggatcatatcgctgagaacattctgtcatacctggatgccaaatcactatgtgctgctgaacttgtgtgcaaggaatggtaccgagtgacctctgatggcatgctgtggaagaagcttatcgagagaatggtcaggacagattctctgtggagaggcctggcagaacgaagaggatggggacagtatttattcaaaaacaaacctcctgacgggaatgctcctcccaactctttttatagagcactttatcctaaaattatacaagacattgagacaatagaatctaattcgagaggcagcggcagcggcagcggcagcggcagcggcagcgatgacctaggcgccaacgacgaactgatttccttcaaagacgagggcgaacaggaggagaagagctccgaaaactcctcggcagagagggatttagctgatgtcaaatcgtctctagtcaatgaatcagaaacgtaa

SEQ ID NO: 1806 - DNA, 1032 bp, synthetic construct
  source 1..1032: mol_type = other DNA; note = HA-bTRCP-(GS)1-TCF4 nucleic acid
atgtacccatacgatgttccagattacgctgacccggccgaggcggtgctgcaagagaaggcactcaagtttatgtgctctatgcccaggtctctgtggctgggctgctccagcctggcggacagcatgccttcgctgcgatgcctgtataacccagggactggcgcactcacagctttccagaattcctcagagagagaagactgtaataatggcgaaccccctaggaagataataccagagaagaattcacttagacagacatacaacagctgtgccagactctgcttaaaccaagaaacagtatgtttagcaagcactgctatgaagactgagaattgtgtggccaaaacaaaacttgccaatggcacttccagtatgattgtgcccaagcaacggaaactctcagcaagctatgaaaaggaaaaggaactgtgtgtcaaatactttgagcagtggtcagagtcagatcaagtggaatttgtggaacatcttatatcccaaatgtgtcattaccaacatgggcacataaactcgtatcttaaacctatgttgcagagagatttcataactgctctgccagctcggggattggatcatatcgctgagaacattctgtcatacctggatgccaaatcactatgtgctgctgaacttgtgtgcaaggaatggtaccgagtgacctctgatggcatgctgtggaagaagcttatcgagagaatggtcaggacagattctctgtggagaggcctggcagaacgaagaggatggggacagtatttattcaaaaacaaacctcctgacgggaatgctcctcccaactctttttatagagcactttatcctaaaattatacaagacattgagacaatagaatctaattcgagaggcagcgatgacctaggcgccaacgacgaactgatttccttcaaagacgagggcgaacaggaggagaagagctccgaaaactcctcggcagagagggatttagctgatgtcaaatcgtctctagtcaatgaatcagaaacgtaa

SEQ ID NO: 1807 - DNA, 1038 bp, synthetic construct
  source 1..1038: mol_type = other DNA; note = HA-bTRCP-(GS)2-TCF4 nucleic acid
atgtacccatacgatgttccagattacgctgacccggccgaggcggtgctgcaagagaaggcactcaagtttatgtgctctatgcccaggtctctgtggctgggctgctccagcctggcggacagcatgccttcgctgcgatgcctgtataacccagggactggcgcactcacagctttccagaattcctcagagagagaagactgtaataatggcgaaccccctaggaagataataccagagaagaattcacttagacagacatacaacagctgtgccagactctgcttaaaccaagaaacagtatgtttagcaagcactgctatgaagactgagaattgtgtggccaaaacaaaacttgccaatggcacttccagtatgattgtgcccaagcaacggaaactctcagcaagctatgaaaaggaaaaggaactgtgtgtcaaatactttgagcagtggtcagagtcagatcaagtggaatttgtggaacatcttatatcccaaatgtgtcattaccaacatgggcacataaactcgtatcttaaacctatgttgcagagagatttcataactgctctgccagctcggggattggatcatatcgctgagaacattctgtcatacctggatgccaaatcactatgtgctgctgaacttgtgtgcaaggaatggtaccgagtgacctctgatggcatgctgtggaagaagcttatcgagagaatggtcaggacagattctctgtggagaggcctggcagaacgaagaggatggggacagtatttattcaaaaacaaacctcctgacgggaatgctcctcccaactctttttatagagcactttatcctaaaattatacaagacattgagacaatagaatctaattcgagaggcagcggcagcgatgacctaggcgccaacgacgaactgatttccttcaaagacgagggcgaacaggaggagaagagctccgaaaactcctcggcagagagggatttagctgatgtcaaatcgtctctagtcaatgaatcagaaacgtaa

SEQ ID NO: 1808 - DNA, 1044 bp, synthetic construct
  source 1..1044: mol_type = other DNA; note = HA-bTRCP-(GS)3-TCF4 nucleic acid
atgtacccatacgatgttccagattacgctgacccggccgaggcggtgctgcaagagaaggcactcaagtttatgtgctctatgcccaggtctctgtggctgggctgctccagcctggcggacagcatgccttcgctgcgatgcctgtataacccagggactggcgcactcacagctttccagaattcctcagagagagaagactgtaataatggcgaaccccctaggaagataataccagagaagaattcacttagacagacatacaacagctgtgccagactctgcttaaaccaagaaacagtatgtttagcaagcactgctatgaagactgagaattgtgtggccaaaacaaaacttgccaatggcacttccagtatgattgtgcccaagcaacggaaactctcagcaagctatgaaaaggaaaaggaactgtgtgtcaaatactttgagcagtggtcagagtcagatcaagtggaatttgtggaacatcttatatcccaaatgtgtcattaccaacatgggcacataaactcgtatcttaaacctatgttgcagagagatttcataactgctctgccagctcggggattggatcatatcgctgagaacattctgtcatacctggatgccaaatcactatgtgctgctgaacttgtgtgcaaggaatggtaccgagtgacctctgatggcatgctgtggaagaagcttatcgagagaatggtcaggacagattctctgtggagaggcctggcagaacgaagaggatggggacagtatttattcaaaaacaaacctcctgacgggaatgctcctcccaactctttttatagagcactttatcctaaaattatacaagacattgagacaatagaatctaattcgagaggcagcggcagcggcagcgatgacctaggcgccaacgacgaactgatttccttcaaagacgagggcgaacaggaggagaagagctccgaaaactcctcggcagagagggatttagctgatgtcaaatcgtctctagtcaatgaatcagaaacgtaa

SEQ ID NO: 1809 - DNA, 1050 bp, synthetic construct
  source 1..1050: mol_type = other DNA; note = HA-bTRCP-(GS)4-TCF4 nucleic acid
atgtacccatacgatgttccagattacgctgacccggccgaggcggtgctgcaagagaaggcactcaagtttatgtgctctatgcccaggtctctgtggctgggctgctccagcctggcggacagcatgccttcgctgcgatgcctgtataacccagggactggcgcactcacagctttccagaattcctcagagagagaagactgtaataatggcgaaccccctaggaagataataccagagaagaattcacttagacagacatacaacagctgtgccagactctgcttaaaccaagaaacagtatgtttagcaagcactgctatgaagactgagaattgtgtggccaaaacaaaacttgccaatggcacttccagtatgattgtgcccaagcaacggaaactctcagcaagctatgaaaaggaaaaggaactgtgtgtcaaatactttgagcagtggtcagagtcagatcaagtggaatttgtggaacatcttatatcccaaatgtgtcattaccaacatgggcacataaactcgtatcttaaacctatgttgcagagagatttcataactgctctgccagctcggggattggatcatatcgctgagaacattctgtcatacctggatgccaaatcactatgtgctgctgaacttgtgtgcaaggaatggtaccgagtgacctctgatggcatgctgtggaagaagcttatcgagagaatggtcaggacagattctctgtggagaggcctggcagaacgaagaggatggggacagtatttattcaaaaacaaacctcctgacgggaatgctcctcccaactctttttatagagcactttatcctaaaattatacaagacattgagacaatagaatctaattcgagaggcagcggcagcggcagcggcagcgatgacctaggcgccaacgacgaactgatttccttcaaagacgagggcgaacaggaggagaagagctccgaaaactcctcggcagagagggatttagctgatgtcaaatcgtctctagtcaatgaatcagaaacgtaa

SEQ ID NO: 1810 - DNA, 1056 bp, synthetic construct
  source 1..1056: mol_type = other DNA; note = HA-bTRCP-(GS)5-TCF4 nucleic acid
atgtacccatacgatgttccagattacgctgacccggccgaggcggtgctgcaagagaaggcactcaagtttatgtgctctatgcccaggtctctgtggctgggctgctccagcctggcggacagcatgccttcgctgcgatgcctgtataacccagggactggcgcactcacagctttccagaattcctcagagagagaagactgtaataatggcgaaccccctaggaagataataccagagaagaattcacttagacagacatacaacagctgtgccagactctgcttaaaccaagaaacagtatgtttagcaagcactgctatgaagactgagaattgtgtggccaaaacaaaacttgccaatggcacttccagtatgattgtgcccaagcaacggaaactctcagcaagctatgaaaaggaaaaggaactgtgtgtcaaatactttgagcagtggtcagagtcagatcaagtggaatttgtggaacatcttatatcccaaatgtgtcattaccaacatgggcacataaactcgtatcttaaacctatgttgcagagagatttcataactgctctgccagctcggggattggatcatatcgctgagaacattctgtcatacctggatgccaaatcactatgtgctgctgaacttgtgtgcaaggaatggtaccgagtgacctctgatggcatgctgtggaagaagcttatcgagagaatggtcaggacagattctctgtggagaggcctggcagaacgaagaggatggggacagtatttattcaaaaacaaacctcctgacgggaatgctcctcccaactctttttatagagcactttatcctaaaattatacaagacattgagacaatagaatctaattcgagaggcagcggcagcggcagcggcagcggcagcgatgacctaggcgccaacgacgaactgatttccttcaaagacgagggcgaacaggaggagaagagctccgaaaactcctcggcagagagggatttagctgatgtcaaatcgtctctagtcaatgaatcagaaacgtaa

SEQ ID NO: 1811 - DNA, 1062 bp, synthetic construct
  source 1..1062: mol_type = other DNA; note = HA-bTRCP-(GS)6-TCF4 nucleic acid
atgtacccatacgatgttccagattacgctgacccggccgaggcggtgctgcaagagaaggcactcaagtttatgtgctctatgcccaggtctctgtggctgggctgctccagcctggcggacagcatgccttcgctgcgatgcctgtataacccagggactggcgcactcacagctttccagaattcctcagagagagaagactgtaataatggcgaaccccctaggaagataataccagagaagaattcacttagacagacatacaacagctgtgccagactctgcttaaaccaagaaacagtatgtttagcaagcactgctatgaagactgagaattgtgtggccaaaacaaaacttgccaatggcacttccagtatgattgtgcccaagcaacggaaactctcagcaagctatgaaaaggaaaaggaactgtgtgtcaaatactttgagcagtggtcagagtcagatcaagtggaatttgtggaacatcttatatcccaaatgtgtcattaccaacatgggcacataaactcgtatcttaaacctatgttgcagagagatttcataactgctctgccagctcggggattggatcatatcgctgagaacattctgtcatacctggatgccaaatcactatgtgctgctgaacttgtgtgcaaggaatggtaccgagtgacctctgatggcatgctgtggaagaagcttatcgagagaatggtcaggacagattctctgtggagaggcctggcagaacgaagaggatggggacagtatttattcaaaaacaaacctcctgacgggaatgctcctcccaactctttttatagagcactttatcctaaaattatacaagacattgagacaatagaatctaattcgagaggcagcggcagcggcagcggcagcggcagcggcagcgatgacctaggcgccaacgacgaactgatttccttcaaagacgagggcgaacaggaggagaagagctccgaaaactcctcggcagagagggatttagctgatgtcaaatcgtctctagtcaatgaatcagaaacgtaa

SEQ ID NO: 1812 - DNA, 1107 bp, synthetic construct
  source 1..1107: mol_type = other DNA; note = Keap1-(GS)1-TCF4 nucleic acid
cagccagatcccaggcctagcggggctggggcctgctgccgattcctgcccctgcagtcacagtgccctgagggggcaggggacgcggtgatgtacgcctccactgagtgcaaggcggaggtgacgccctcccagcatggcaaccgcaccttcagctacaccctggaggatcataccaagcaggcctttggcatcatgaacgagctgcggctcagccagcagctgtgtgacgtcacactgcaggtcaagtaccaggatgcaccggccgcccagttcatggcccacaaggtggtgctggcctcatccagccctgtcttcaaggccatgttcaccaacgggctgcgggagcagggcatggaggtggtgtccattgagggtatccaccccaaggtcatggagcgcctcattgaattcgcctacacggcctccatctccatgggcgagaagtgtgtcctccacgtcatgaacggtgctgtcatgtaccagatcgacagcgttgtccgtgcctgcagtgacttcctggtgcagcagctggaccccagcaatgccatcggcatcgccaacttcgctgagcagattggctgtgtggagttgcaccagcgtgcccgggagtacatctacatgcattttggggaggtggccaagcaagaggagttcttcaacctgtcccactgccaactggtgaccctcatcagccgggacgacctgaacgtgcgctgcgagtccgaggtcttccacgcctgcatcaactgggtcaagtacgactgcgaacagcgacggttctacgtccaggcgctgctgcgggccgtgcgctgccactcgttgacgccgaacttcctgcagatgcagctgcagaagtgcgagatcctgcagtccgactcccgctgcaaggactacctggtcaagatcttcgaggagctcaccctgcacaagcccacgcaggtgatgccctgccgggcgcccggcagcgatgacctaggcgccaacgacgaactgatttccttcaaagacgagggcgaacaggaggagaagagctccgaaaactcctcggcagagagggatttagctgatgtcaaatcgtctctagtcaatgaatcagaaacgtaa

SEQ ID NO: 1813 - DNA, 1113 bp, synthetic construct
  source 1..1113: mol_type = other DNA; note = Keap1-(GS)2-TCF4 nucleic acid
cagccagatcccaggcctagcggggctggggcctgctgccgattcctgcccctgcagtcacagtgccctgagggggcaggggacgcggtgatgtacgcctccactgagtgcaaggcggaggtgacgccctcccagcatggcaaccgcaccttcagctacaccctggaggatcataccaagcaggcctttggcatcatgaacgagctgcggctcagccagcagctgtgtgacgtcacactgcaggtcaagtaccaggatgcaccggccgcccagttcatggcccacaaggtggtgctggcctcatccagccctgtcttcaaggccatgttcaccaacgggctgcgggagcagggcatggaggtggtgtccattgagggtatccaccccaaggtcatggagcgcctcattgaattcgcctacacggcctccatctccatgggcgagaagtgtgtcctccacgtcatgaacggtgctgtcatgtaccagatcgacagcgttgtccgtgcctgcagtgacttcctggtgcagcagctggaccccagcaatgccatcggcatcgccaacttcgctgagcagattggctgtgtggagttgcaccagcgtgcccgggagtacatctacatgcattttggggaggtggccaagcaagaggagttcttcaacctgtcccactgccaactggtgaccctcatcagccgggacgacctgaacgtgcgctgcgagtccgaggtcttccacgcctgcatcaactgggtcaagtacgactgcgaacagcgacggttctacgtccaggcgctgctgcgggccgtgcgctgccactcgttgacgccgaacttcctgcagatgcagctgcagaagtgcgagatcctgcagtccgactcccgctgcaaggactacctggtcaagatcttcgaggagctcaccctgcacaagcccacgcaggtgatgccctgccgggcgcccggcagcggcagcgatgacctaggcgccaacgacgaactgatttccttcaaagacgagggcgaacaggaggagaagagctccgaaaactcctcggcagagagggatttagctgatgtcaaatcgtctctagtcaatgaatcagaaacgtaa

SEQ ID NO: 1814 - DNA, 1119 bp, synthetic construct
  source 1..1119: mol_type = other DNA; note = Keap1-(GS)3-TCF4 nucleic acid
cagccagatcccaggcctagcggggctggggcctgctgccgattcctgcccctgcagtcacagtgccctgagggggcaggggacgcggtgatgtacgcctccactgagtgcaaggcggaggtgacgccctcccagcatggcaaccgcaccttcagctacaccctggaggatcataccaagcaggcctttggcatcatgaacgagctgcggctcagccagcagctgtgtgacgtcacactgcaggtcaagtaccaggatgcaccggccgcccagttcatggcccacaaggtggtgctggcctcatccagccctgtcttcaaggccatgttcaccaacgggctgcgggagcagggcatggaggtggtgtccattgagggtatccaccccaaggtcatggagcgcctcattgaattcgcctacacggcctccatctccatgggcgagaagtgtgtcctccacgtcatgaacggtgctgtcatgtaccagatcgacagcgttgtccgtgcctgcagtgacttcctggtgcagcagctggaccccagcaatgccatcggcatcgccaacttcgctgagcagattggctgtgtggagttgcaccagcgtgcccgggagtacatctacatgcattttggggaggtggccaagcaagaggagttcttcaacctgtcccactgccaactggtgaccctcatcagccgggacgacctgaacgtgcgctgcgagtccgaggtcttccacgcctgcatcaactgggtcaagtacgactgcgaacagcgacggttctacgtccaggcgctgctgcgggccgtgcgctgccactcgttgacgccgaacttcctgcagatgcagctgcagaagtgcgagatcctgcagtccgactcccgctgcaaggactacctggtcaagatcttcgaggagctcaccctgcacaagcccacgcaggtgatgccctgccgggcgcccggcagcggcagcggcagcgatgacctaggcgccaacgacgaactgatttccttcaaagacgagggcgaacaggaggagaagagctccgaaaactcctcggcagagagggatttagctgatgtcaaatcgtctctagtcaatgaatcagaaacgtaa

SEQ ID NO: 1815 - DNA, 1125 bp, synthetic construct
  source 1..1125: mol_type = other DNA; note = Keap1-(GS)4-TCF4 nucleic acid
cagccagatcccaggcctagcggggctggggcctgctgccgattcctgcccctgcagtcacagtgccctgagggggcaggggacgcggtgatgtacgcctccactgagtgcaaggcggaggtgacgccctcccagcatggcaaccgcaccttcagctacaccctggaggatcataccaagcaggcctttggcatcatgaacgagctgcggctcagccagcagctgtgtgacgtcacactgcaggtcaagtaccaggatgcaccggccgcccagttcatggcccacaaggtggtgctggcctcatccagccctgtcttcaaggccatgttcaccaacgggctgcgggagcagggcatggaggtggtgtccattgagggtatccaccccaaggtcatggagcgcctcattgaattcgcctacacggcctccatctccatgggcgagaagtgtgtcctccacgtcatgaacggtgctgtcatgtaccagatcgacagcgttgtccgtgcctgcagtgacttcctggtgcagcagctggaccccagcaatgccatcggcatcgccaacttcgctgagcagattggctgtgtggagttgcaccagcgtgcccgggagtacatctacatgcattttggggaggtggccaagcaagaggagttcttcaacctgtcccactgccaactggtgaccctcatcagccgggacgacctgaacgtgcgctgcgagtccgaggtcttccacgcctgcatcaactgggtcaagtacgactgcgaacagcgacggttctacgtccaggcgctgctgcgggccgtgcgctgccactcgttgacgccgaacttcctgcagatgcagctgcagaagtgcgagatcctgcagtccgactcccgctgcaaggactacctggtcaagatcttcgaggagctcaccctgcacaagcccacgcaggtgatgccctgccgggcgcccggcagcggcagcggcagcggcagcgatgacctaggcgccaacgacgaactgatttccttcaaagacgagggcgaacaggaggagaagagctccgaaaactcctcggcagagagggatttagctgatgtcaaatcgtctctagtcaatgaatcagaaacgtaa

SEQ ID NO: 1816 - DNA, 1131 bp, synthetic construct
  source 1..1131: mol_type = other DNA; note = Keap1-(GS)5-TCF4 nucleic acid
cagccagatcccaggcctagcggggctggggcctgctgccgattcctgcccctgcagtcacagtgccctgagggggcaggggacgcggtgatgtacgcctccactgagtgcaaggcggaggtgacgccctcccagcatggcaaccgcaccttcagctacaccctggaggatcataccaagcaggcctttggcatcatgaacgagctgcggctcagccagcagctgtgtgacgtcacactgcaggtcaagtaccaggatgcaccggccgcccagttcatggcccacaaggtggtgctggcctcatccagccctgtcttcaaggccatgttcaccaacgggctgcgggagcagggcatggaggtggtgtccattgagggtatccaccccaaggtcatggagcgcctcattgaattcgcctacacggcctccatctccatgggcgagaagtgtgtcctccacgtcatgaacggtgctgtcatgtaccagatcgacagcgttgtccgtgcctgcagtgacttcctggtgcagcagctggaccccagcaatgccatcggcatcgccaacttcgctgagcagattggctgtgtggagttgcaccagcgtgcccgggagtacatctacatgcattttggggaggtggccaagcaagaggagttcttcaacctgtcccactgccaactggtgaccctcatcagccgggacgacctgaacgtgcgctgcgagtccgaggtcttccacgcctgcatcaactgggtcaagtacgactgcgaacagcgacggttctacgtccaggcgctgctgcgggccgtgcgctgccactcgttgacgccgaacttcctgcagatgcagctgcagaagtgcgagatcctgcagtccgactcccgctgcaaggactacctggtcaagatcttcgaggagctcaccctgcacaagcccacgcaggtgatgccctgccgggcgcccggcagcggcagcggcagcggcagcggcagcgatgacctaggcgccaacgacgaactgatttccttcaaagacgagggcgaacaggaggagaagagctccgaaaactcctcggcagagagggatttagctgatgtcaaatcgtctctagtcaatgaatcagaaacgtaa

SEQ ID NO: 1817 - DNA, 1137 bp, synthetic construct
  source 1..1137: mol_type = other DNA; note = Keap1-(GS)6-TCF4 nucleic acid
cagccagatcccaggcctagcggggctggggcctgctgccgattcctgcccctgcagtcacagtgccctgagggggcaggggacgcggtgatgtacgcctccactgagtgcaaggcggaggtgacgccctcccagcatggcaaccgcaccttcagctacaccctggaggatcataccaagcaggcctttggcatcatgaacgagctgcggctcagccagcagctgtgtgacgtcacactgcaggtcaagtaccaggatgcaccggccgcccagttcatggcccacaaggtggtgctggcctcatccagccctgtcttcaaggccatgttcaccaacgggctgcgggagcagggcatggaggtggtgtccattgagggtatccaccccaaggtcatggagcgcctcattgaattcgcctacacggcctccatctccatgggcgagaagtgtgtcctccacgtcatgaacggtgctgtcatgtaccagatcgacagcgttgtccgtgcctgcagtgacttcctggtgcagcagctggaccccagcaatgccatcggcatcgccaacttcgctgagcagattggctgtgtggagttgcaccagcgtgcccgggagtacatctacatgcattttggggaggtggccaagcaagaggagttcttcaacctgtcccactgccaactggtgaccctcatcagccgggacgacctgaacgtgcgctgcgagtccgaggtcttccacgcctgcatcaactgggtcaagtacgactgcgaacagcgacggttctacgtccaggcgctgctgcgggccgtgcgctgccactcgttgacgccgaacttcctgcagatgcagctgcagaagtgcgagatcctgcagtccgactcccgctgcaaggactacctggtcaagatcttcgaggagctcaccctgcacaagcccacgcaggtgatgccctgccgggcgcccggcagcggcagcggcagcggcagcggcagcggcagcgatgacctaggcgccaacgacgaactgatttccttcaaagacgagggcgaacaggaggagaagagctccgaaaactcctcggcagagagggatttagctgatgtcaaatcgtctctagtcaatgaatcagaaacgtaa

SEQ ID NO: 1818 - DNA, 1155 bp, synthetic construct
  source 1..1155: mol_type = other DNA; note = HA-Keap1-(GS)1-TCF4 nucleic acid
atgtacccatacgatgttccagattacgctggcagcggcagcggcagccagccagatcccaggcctagcggggctggggcctgctgccgattcctgcccctgcagtcacagtgccctgagggggcaggggacgcggtgatgtacgcctccactgagtgcaaggcggaggtgacgccctcccagcatggcaaccgcaccttcagctacaccctggaggatcataccaagcaggcctttggcatcatgaacgagctgcggctcagccagcagctgtgtgacgtcacactgcaggtcaagtaccaggatgcaccggccgcccagttcatggcccacaaggtggtgctggcctcatccagccctgtcttcaaggccatgttcaccaacgggctgcgggagcagggcatggaggtggtgtccattgagggtatccaccccaaggtcatggagcgcctcattgaattcgcctacacggcctccatctccatgggcgagaagtgtgtcctccacgtcatgaacggtgctgtcatgtaccagatcgacagcgttgtccgtgcctgcagtgacttcctggtgcagcagctggaccccagcaatgccatcggcatcgccaacttcgctgagcagattggctgtgtggagttgcaccagcgtgcccgggagtacatctacatgcattttggggaggtggccaagcaagaggagttcttcaacctgtcccactgccaactggtgaccctcatcagccgggacgacctgaacgtgcgctgcgagtccgaggtcttccacgcctgcatcaactgggtcaagtacgactgcgaacagcgacggttctacgtccaggcgctgctgcgggccgtgcgctgccactcgttgacgccgaacttcctgcagatgcagctgcagaagtgcgagatcctgcagtccgactcccgctgcaaggactacctggtcaagatcttcgaggagctcaccctgcacaagcccacgcaggtgatgccctgccgggcgcccggcagcgatgacctaggcgccaacgacgaactgatttccttcaaagacgagggcgaacaggaggagaagagctccgaaaactcctcggcagagagggatttagctgatgtcaaatcgtctctagtcaatgaatcagaaacgtaa

SEQ ID NO: 1819 - DNA, 1161 bp, synthetic construct
  source 1..1161: mol_type = other DNA; note = HA-Keap1-(GS)2-TCF4 nucleic acid
atgtacccatacgatgttccagattacgctggcagcggcagcggcagccagccagatcccaggcctagcggggctggggcctgctgccgattcctgcccctgcagtcacagtgccctgagggggcaggggacgcggtgatgtacgcctccactgagtgcaaggcggaggtgacgccctcccagcatggcaaccgcaccttcagctacaccctggaggatcataccaagcaggcctttggcatcatgaacgagctgcggctcagccagcagctgtgtgacgtcacactgcaggtcaagtaccaggatgcaccggccgcccagttcatggcccacaaggtggtgctggcctcatccagccctgtcttcaaggccatgttcaccaacgggctgcgggagcagggcatggaggtggtgtccattgagggtatccaccccaaggtcatggagcgcctcattgaattcgcctacacggcctccatctccatgggcgagaagtgtgtcctccacgtcatgaacggtgctgtcatgtaccagatcgacagcgttgtccgtgcctgcagtgacttcctggtgcagcagctggaccccagcaatgccatcggcatcgccaacttcgctgagcagattggctgtgtggagttgcaccagcgtgcccgggagtacatctacatgcattttggggaggtggccaagcaagaggagttcttcaacctgtcccactgccaactggtgaccctcatcagccgggacgacctgaacgtgcgctgcgagtccgaggtcttccacgcctgcatcaactgggtcaagtacgactgcgaacagcgacggttctacgtccaggcgctgctgcgggccgtgcgctgccactcgttgacgccgaacttcctgcagatgcagctgcagaagtgcgagatcctgcagtccgactcccgctgcaaggactacctggtcaagatcttcgaggagctcaccctgcacaagcccacgcaggtgatgccctgccgggcgcccggcagcggcagcgatgacctaggcgccaacgacgaactgatttccttcaaagacgagggcgaacaggaggagaagagctccgaaaactcctcggcagagagggatttagctgatgtcaaatcgtctctagtcaatgaatcagaaacgtaa

SEQ ID NO: 1820 - DNA, 1167 bp, synthetic construct
  source 1..1167: mol_type = other DNA; note = HA-Keap1-(GS)3-TCF4 nucleic acid
atgtacccatacgatgttccagattacgctggcagcggcagcggcagccagccagatcccaggcctagcggggctggggcctgctgccgattcctgcccctgcagtcacagtgccctgagggggcaggggacgcggtgatgtacgcctccactgagtgcaaggcggaggtgacgccctcccagcatggcaaccgcaccttcagctacaccctggaggatcataccaagcaggcctttggcatcatgaacgagctgcggctcagccagcagctgtgtgacgtcacactgcaggtcaagtaccaggatgcaccggccgcccagttcatggcccacaaggtggtgctggcctcatccagccctgtcttcaaggccatgttcaccaacgggctgcgggagcagggcatggaggtggtgtccattgagggtatccaccccaaggtcatggagcgcctcattgaattcgcctacacggcctccatctccatgggcgagaagtgtgtcctccacgtcatgaacggtgctgtcatgtaccagatcgacagcgttgtccgtgcctgcagtgacttcctggtgcagcagctggaccccagcaatgccatcggcatcgccaacttcgctgagcagattggctgtgtggagttgcaccagcgtgcccgggagtacatctacatgcattttggggaggtggccaagcaagaggagttcttcaacctgtcccactgccaactggtgaccctcatcagccgggacgacctgaacgtgcgctgcgagtccgaggtcttccacgcctgcatcaactgggtcaagtacgactgcgaacagcgacggttctacgtccaggcgctgctgcgggccgtgcgctgccactcgttgacgccgaacttcctgcagatgcagctgcagaagtgcgagatcctgcagtccgactcccgctgcaaggactacctggtcaagatcttcgaggagctcaccctgcacaagcccacgcaggtgatgccctgccgggcgcccggcagcggcagcggcagcgatgacctaggcgccaacgacgaactgatttccttcaaagacgagggcgaacaggaggagaagagctccgaaaactcctcggcagagagggatttagctgatgtcaaatcgtctctagtcaatgaatcagaaacgtaa

SEQ ID NO: 1821 - DNA, 1173 bp, synthetic construct
  source 1..1173: mol_type = other DNA; note = HA-Keap1-(GS)4-TCF4 nucleic acid
atgtacccatacgatgttccagattacgctggcagcggcagcggcagccagccagatcccaggcctagcggggctggggcctgctgccgattcctgcccctgcagtcacagtgccctgagggggcaggggacgcggtgatgtacgcctccactgagtgcaaggcggaggtgacgccctcccagcatggcaaccgcaccttcagctacaccctggaggatcataccaagcaggcctttggcatcatgaacgagctgcggctcagccagcagctgtgtgacgtcacactgcaggtcaagtaccaggatgcaccggccgcccagttcatggcccacaaggtggtgctggcctcatccagccctgtcttcaaggccatgttcaccaacgggctgcgggagcagggcatggaggtggtgtccattgagggtatccaccccaaggtcatggagcgcctcattgaattcgcctacacggcctccatctccatgggcgagaagtgtgtcctccacgtcatgaacggtgctgtcatgtaccagatcgacagcgttgtccgtgcctgcagtgacttcctggtgcagcagctggaccccagcaatgccatcggcatcgccaacttcgctgagcagattggctgtgtggagttgcaccagcgtgcccgggagtacatctacatgcattttggggaggtggccaagcaagaggagttcttcaacctgtcccactgccaactggtgaccctcatcagccgggacgacctgaacgtgcgctgcgagtccgaggtcttccacgcctgcatcaactgggtcaagtacgactgcgaacagcgacggttctacgtccaggcgctgctgcgggccgtgcgctgccactcgttgacgccgaacttcctgcagatgcagctgcagaagtgcgagatcctgcagtccgactcccgctgcaaggactacctggtcaagatcttcgaggagctcaccctgcacaagcccacgcaggtgatgccctgccgggcgcccggcagcggcagcggcagcggcagcgatgacctaggcgccaacgacgaactgatttccttcaaagacgagggcgaacaggaggagaagagctccgaaaactcctcggcagagagggatttagctgatgtcaaatcgtctctagtcaatgaatcagaaacgtaa

SEQ ID NO: 1822 - DNA, 1179 bp, synthetic construct
  source 1..1179: mol_type = other DNA; note = HA-Keap1-(GS)5-TCF4 nucleic acid
atgtacccatacgatgttccagattacgctggcagcggcagcggcagccagccagatcccaggcctagcggggctggggcctgctgccgattcctgcccctgcagtcacagtgccctgagggggcaggggacgcggtgatgtacgcctccactgagtgcaaggcggaggtgacgccctcccagcatggcaaccgcaccttcagctacaccctggaggatcataccaagcaggcctttggcatcatgaacgagctgcggctcagccagcagctgtgtgacgtcacactgcaggtcaagtaccaggatgcaccggccgcccagttcatggcccacaaggtggtgctggcctcatccagccctgtcttcaaggccatgttcaccaacgggctgcgggagcagggcatggaggtggtgtccattgagggtatccaccccaaggtcatggagcgcctcattgaattcgcctacacggcctccatctccatgggcgagaagtgtgtcctccacgtcatgaacggtgctgtcatgtaccagatcgacagcgttgtccgtgcctgcagtgacttcctggtgcagcagctggaccccagcaatgccatcggcatcgccaacttcgctgagcagattggctgtgtggagttgcaccagcgtgcccgggagtacatctacatgcattttggggaggtggccaagcaagaggagttcttcaacctgtcccactgccaactggtgaccctcatcagccgggacgacctgaacgtgcgctgcgagtccgaggtcttccacgcctgcatcaactgggtcaagtacgactgcgaacagcgacggttctacgtccaggcgctgctgcgggccgtgcgctgccactcgttgacgccgaacttcctgcagatgcagctgcagaagtgcgagatcctgcagtccgactcccgctgcaaggactacctggtcaagatcttcgaggagctcaccctgcacaagcccacgcaggtgatgccctgccgggcgcccggcagcggcagcggcagcggcagcggcagcgatgacctaggcgccaacgacgaactgatttccttcaaagacgagggcgaacaggaggagaagagctccgaaaactcctcggcagagagggatttagctgatgtcaaatcgtctctagtcaatgaatcagaaacgtaa

SEQ ID NO: 1823 - DNA, 1185 bp, synthetic construct
  source 1..1185: mol_type = other DNA; note = HA-Keap1-(GS)6-TCF4 nucleic acid
atgtacccatacgatgttccagattacgctggcagcggcagcggcagccagccagatcccaggcctagcggggctggggcctgctgccgattcctgcccctgcagtcacagtgccctgagggggcaggggacgcggtgatgtacgcctccactgagtgcaaggcggaggtgacgccctcccagcatggcaaccgcaccttcagctacaccctggaggatcataccaagcaggcctttggcatcatgaacgagctgcggctcagccagcagctgtgtgacgtcacactgcaggtcaagtaccaggatgcaccggccgcccagttcatggcccacaaggtggtgctggcctcatccagccctgtcttcaaggccatgttcaccaacgggctgcgggagcagggcatggaggtggtgtccattgagggtatccaccccaaggtcatggagcgcctcattgaattcgcctacacggcctccatctccatgggcgagaagtgtgtcctccacgtcatgaacggtgctgtcatgtaccagatcgacagcgttgtccgtgcctgcagtgacttcctggtgcagcagctggaccccagcaatgccatcggcatcgccaacttcgctgagcagattggctgtgtggagttgcaccagcgtgcccgggagtacatctacatgcattttggggaggtggccaagcaagaggagttcttcaacctgtcccactgccaactggtgaccctcatcagccgggacgacctgaacgtgcgctgcgagtccgaggtcttccacgcctgcatcaactgggtcaagtacgactgcgaacagcgacggttctacgtccaggcgctgctgcgggccgtgcgctgccactcgttgacgccgaacttcctgcagatgcagctgcagaagtgcgagatcctgcagtccgactcccgctgcaaggactacctggtcaagatcttcgaggagctcaccctgcacaagcccacgcaggtgatgccctgccgggcgcccggcagcggcagcggcagcggcagcggcagcggcagcgatgacctaggcgccaacgacgaactgatttccttcaaagacgagggcgaacaggaggagaagagctccgaaaactcctcggcagagagggatttagctgatgtcaaatcgtctctagtcaatgaatcagaaacgtaa

SEQ ID NO: 1824 - DNA, 525 bp, synthetic construct
  source 1..525: mol_type = other DNA; note = RNF125-(GS)1-TCF4 nucleic acid
ggctccgtgctgagcaccgacagcggcaaatcggcgcccgcctctgccaccgcgcgggccctggagcgcaggagggacccggagttgcccgtcacgtccttcgactgcgccgtgtgccttgaggtgttacaccagcctgtccggacccgctgcggccacgtattctgccgttcctgtattgctaccagtctgaagaacaacaagtggacctgtccttattgccgggcatatcttccttcagaaggagttccagcaactgatgtagccaaaagaatgaaatcagagtataagaactgcgctgagtgtgacaccctggtttgcctcagtgaaatgagggcacatattcggacttgtcagaagtacatagataagtatggaccaggcagcgatgacctaggcgccaacgacgaactgatttccttcaaagacgagggcgaacaggaggagaagagctccgaaaactcctcggcagagagggatttagctgatgtcaaatcgtctctagtcaatgaatcagaaacgtaa

SEQ ID NO: 1825 - DNA, 531 bp, synthetic construct
  source 1..531: mol_type = other DNA; note = RNF125-(GS)2-TCF4 nucleic acid
ggctccgtgctgagcaccgacagcggcaaatcggcgcccgcctctgccaccgcgcgggccctggagcgcaggagggacccggagttgcccgtcacgtccttcgactgcgccgtgtgccttgaggtgttacaccagcctgtccggacccgctgcggccacgtattctgccgttcctgtattgctaccagtctgaagaacaacaagtggacctgtccttattgccgggcatatcttccttcagaaggagttccagcaactgatgtagccaaaagaatgaaatcagagtataagaactgcgctgagtgtgacaccctggtttgcctcagtgaaatgagggcacatattcggacttgtcagaagtacatagataagtatggaccaggcagcggcagcgatgacctaggcgccaacgacgaactgatttccttcaaagacgagggcgaacaggaggagaagagctccgaaaactcctcggcagagagggatttagctgatgtcaaatcgtctctagtcaatgaatcagaaacgtaa

SEQ ID NO: 1826 - DNA, 537 bp, synthetic construct
  source 1..537: mol_type = other DNA; note = RNF125-(GS)3-TCF4 nucleic acid
ggctccgtgctgagcaccgacagcggcaaatcggcgcccgcctctgccaccgcgcgggccctggagcgcaggagggacccggagttgcccgtcacgtccttcgactgcgccgtgtgccttgaggtgttacaccagcctgtccggacccgctgcggccacgtattctgccgttcctgtattgctaccagtctgaagaacaacaagtggacctgtccttattgccgggcatatcttccttcagaaggagttccagcaactgatgtagccaaaagaatgaaatcagagtataagaactgcgctgagtgtgacaccctggtttgcctcagtgaaatgagggcacatattcggacttgtcagaagtacatagataagtatggaccaggcagcggcagcggcagcgatgacctaggcgccaacgacgaactgatttccttcaaagacgagggcgaacaggaggagaagagctccgaaaactcctcggcagagagggatttagctgatgtcaaatcgtctctagtcaatgaatcagaaacgtaa

SEQ ID NO: 1827 - DNA, 543 bp, synthetic construct
  source 1..543: mol_type = other DNA; note = RNF125-(GS)4-TCF4 nucleic acid
ggctccgtgctgagcaccgacagcggcaaatcggcgcccgcctctgccaccgcgcgggccctggagcgcaggagggacccggagttgcccgtcacgtccttcgactgcgccgtgtgccttgaggtgttacaccagcctgtccggacccgctgcggccacgtattctgccgttcctgtattgctaccagtctgaagaacaacaagtggacctgtccttattgccgggcatatcttccttcagaaggagttccagcaactgatgtagccaaaagaatgaaatcagagtataagaactgcgctgagtgtgacaccctggtttgcctcagtgaaatgagggcacatattcggacttgtcagaagtacatagataagtatggaccaggcagcggcagcggcagcggcagcgatgacctaggcgccaacgacgaactgatttccttcaaagacgagggcgaacaggaggagaagagctccgaaaactcctcggcagagagggatttagctgatgtcaaatcgtctctagtcaatgaatcagaaacgtaa

SEQ ID NO: 1828 - DNA, 549 bp, synthetic construct
  source 1..549: mol_type = other DNA; note = RNF125-(GS)5-TCF4 nucleic acid
ggctccgtgctgagcaccgacagcggcaaatcggcgcccgcctctgccaccgcgcgggccctggagcgcaggagggacccggagttgcccgtcacgtccttcgactgcgccgtgtgccttgaggtgttacaccagcctgtccggacccgctgcggccacgtattctgccgttcctgtattgctaccagtctgaagaacaacaagtggacctgtccttattgccgggcatatcttccttcagaaggagttccagcaactgatgtagccaaaagaatgaaatcagagtataagaactgcgctgagtgtgacaccctggtttgcctcagtgaaatgagggcacatattcggacttgtcagaagtacatagataagtatggaccaggcagcggcagcggcagcggcagcggcagcgatgacctaggcgccaacgacgaactgatttccttcaaagacgagggcgaacaggaggagaagagctccgaaaactcctcggcagagagggatttagctgatgtcaaatcgtctctagtcaatgaatcagaaacgtaa

SEQ ID NO: 1829 - DNA, 555 bp, synthetic construct
  source 1..555: mol_type = other DNA; note = RNF125-(GS)6-TCF4 nucleic acid
ggctccgtgctgagcaccgacagcggcaaatcggcgcccgcctctgccaccgcgcgggccctggagcgcaggagggacccggagttgcccgtcacgtccttcgactgcgccgtgtgccttgaggtgttacaccagcctgtccggacccgctgcggccacgtattctgccgttcctgtattgctaccagtctgaagaacaacaagtggacctgtccttattgccgggcatatcttccttcagaaggagttccagcaactgatgtagccaaaagaatgaaatcagagtataagaactgcgctgagtgtgacaccctggtttgcctcagtgaaatgagggcacatattcggacttgtcagaagtacatagataagtatggaccaggcagcggcagcggcagcggcagcggcagcggcagcgatgacctaggcgccaacgacgaactgatttccttcaaagacgagggcgaacaggaggagaagagctccgaaaactcctcggcagagagggatttagctgatgtcaaatcgtctctagtcaatgaatcagaaacgtaa

SEQ ID NO: 1830 - DNA, 573 bp, synthetic construct
  source 1..573: mol_type = other DNA; note = HA-RNF125-(GS)1-TCF4 nucleic acid
atgtacccatacgatgttccagattacgctggcagcggcagcggcagcggctccgtgctgagcaccgacagcggcaaatcggcgcccgcctctgccaccgcgcgggccctggagcgcaggagggacccggagttgcccgtcacgtccttcgactgcgccgtgtgccttgaggtgttacaccagcctgtccggacccgctgcggccacgtattctgccgttcctgtattgctaccagtctgaagaacaacaagtggacctgtccttattgccgggcatatcttccttcagaaggagttccagcaactgatgtagccaaaagaatgaaatcagagtataagaactgcgctgagtgtgacaccctggtttgcctcagtgaaatgagggcacatattcggacttgtcagaagtacatagataagtatggaccaggcagcgatgacctaggcgccaacgacgaactgatttccttcaaagacgagggcgaacaggaggagaagagctccgaaaactcctcggcagagagggatttagctgatgtcaaatcgtctctagtcaatgaatcagaaacgtaa

SEQ ID NO: 1831 - DNA, 579 bp, synthetic construct
  source 1..579: mol_type = other DNA; note = HA-RNF125-(GS)2-TCF4 nucleic acid
atgtacccatacgatgttccagattacgctggcagcggcagcggcagcggctccgtgctgagcaccgacagcggcaaatcggcgcccgcctctgccaccgcgcgggccctggagcgcaggagggacccggagttgcccgtcacgtccttcgactgcgccgtgtgccttgaggtgttacaccagcctgtccggacccgctgcggccacgtattctgccgttcctgtattgctaccagtctgaagaacaacaagtggacctgtccttattgccgggcatatcttccttcagaaggagttccagcaactgatgtagccaaaagaatgaaatcagagtataagaactgcgctgagtgtgacaccctggtttgcctcagtgaaatgagggcacatattcggacttgtcagaagtacatagataagtatggaccaggcagcggcagcgatgacctaggcgccaacgacgaactgatttccttcaaagacgagggcgaacaggaggagaagagctccgaaaactcctcggcagagagggatttagctgatgtcaaatcgtctctagtcaatgaatcagaaacgtaa

SEQ ID NO: 1832 - DNA, 585 bp, synthetic construct
  source 1..585: mol_type = other DNA; note = HA-RNF125-(GS)3-TCF4 nucleic acid
atgtacccatacgatgttccagattacgctggcagcggcagcggcagcggctccgtgctgagcaccgacagcggcaaatcggcgcccgcctctgccaccgcgcgggccctggagcgcaggagggacccggagttgcccgtcacgtccttcgactgcgccgtgtgccttgaggtgttacaccagcctgtccggacccgctgcggccacgtattctgccgttcctgtattgctaccagtctgaagaacaacaagtggacctgtccttattgccgggcatatcttccttcagaaggagttccagcaactgatgtagccaaaagaatgaaatcagagtataagaactgcgctgagtgtgacaccctggtttgcctcagtgaaatgagggcacatattcggacttgtcagaagtacatagataagtatggaccaggcagcggcagcggcagcgatgacctaggcgccaacgacgaactgatttccttcaaagacgagggcgaacaggaggagaagagctccgaaaactcctcggcagagagggatttagctgatgtcaaatcgtctctagtcaatgaatcagaaacgtaa

SEQ ID NO: 1833 - DNA, 591 bp, synthetic construct
  source 1..591: mol_type = other DNA; note = HA-RNF125-(GS)4-TCF4 nucleic acid
atgtacccatacgatgttccagattacgctggcagcggcagcggcagcggctccgtgctgagcaccgacagcggcaaatcggcgcccgcctctgccaccgcgcgggccctggagcgcaggagggacccggagttgcccgtcacgtccttcgactgcgccgtgtgccttgaggtgttacaccagcctgtccggacccgctgcggccacgtattctgccgttcctgtattgctaccagtctgaagaacaacaagtggacctgtccttattgccgggcatatcttccttcagaaggagttccagcaactgatgtagccaaaagaatgaaatcagagtataagaactgcgctgagtgtgacaccctggtttgcctcagtgaaatgagggcacatattcggacttgtcagaagtacatagataagtatggaccaggcagcggcagcggcagcggcagcgatgacctaggcgccaacgacgaactgatttccttcaaagacgagggcgaacaggaggagaagagctccgaaaactcctcggcagagagggatttagctgatgtcaaatcgtctctagtcaatgaatcagaaacgtaa

SEQ ID NO: 1834 - DNA, 597 bp, synthetic construct
  source 1..597: mol_type = other DNA; note = HA-RNF125-(GS)5-TCF4 nucleic acid
atgtacccatacgatgttccagattacgctggcagcggcagcggcagcggctccgtgctgagcaccgacagcggcaaatcggcgcccgcctctgccaccgcgcgggccctggagcgcaggagggacccggagttgcccgtcacgtccttcgactgcgccgtgtgccttgaggtgttacaccagcctgtccggacccgctgcggccacgtattctgccgttcctgtattgctaccagtctgaagaacaacaagtggacctgtccttattgccgggcatatcttccttcagaaggagttccagcaactgatgtagccaaaagaatgaaatcagagtataagaactgcgctgagtgtgacaccctggtttgcctcagtgaaatgagggcacatattcggacttgtcagaagtacatagataagtatggaccaggcagcggcagcggcagcggcagcggcagcgatgacctaggcgccaacgacgaactgatttccttcaaagacgagggcgaacaggaggagaagagctccgaaaactcctcggcagagagggatttagctgatgtcaaatcgtctctagtcaatgaatcagaaacgtaa

SEQ ID NO: 1835 - DNA, 603 bp, synthetic construct
  source 1..603: mol_type = other DNA; note = HA-RNF125-(GS)6-TCF4 nucleic acid
atgtacccatacgatgttccagattacgctggcagcggcagcggcagcggctccgtgctgagcaccgacagcggcaaatcggcgcccgcctctgccaccgcgcgggccctggagcgcaggagggacccggagttgcccgtcacgtccttcgactgcgccgtgtgccttgaggtgttacaccagcctgtccggacccgctgcggccacgtattctgccgttcctgtattgctaccagtctgaagaacaacaagtggacctgtccttattgccgggcatatcttccttcagaaggagttccagcaactgatgtagccaaaagaatgaaatcagagtataagaactgcgctgagtgtgacaccctggtttgcctcagtgaaatgagggcacatattcggacttgtcagaagtacatagataagtatggaccaggcagcggcagcggcagcggcagcggcagcggcagcgatgacctaggcgccaacgacgaactgatttccttcaaagacgagggcgaacaggaggagaagagctccgaaaactcctcggcagagagggatttagctgatgtcaaatcgtctctagtcaatgaatcagaaacgtaa

SEQ ID NO: 1836 - protein, 176 aa, synthetic construct; identical to SEQ ID NO: 29
  source 1..176: note = CHIP.1

SEQ ID NO: 1837 - protein, 35 aa, synthetic construct; identical to SEQ ID NO: 43
  source 1..35: note = DCAF1.1

SEQ ID NO: 1838 - protein, 356 aa, synthetic construct; identical to SEQ ID NO: 37
  source 1..356: note = E6AP.1

SEQ ID NO: 1839 - protein, 286 aa, synthetic construct; identical to SEQ ID NO: 40
  source 1..286: note = bTRCP.1

SEQ ID NO: 1840 - protein, 367 aa, synthetic construct; identical to SEQ ID NO: 38
  source 1..367: note = FBXW7a.1

SEQ ID NO: 1841 - protein, 367 aa, synthetic construct
  source 1..367: note = FBXW7a.2
NQELLSVGNKRRRTGGNLRGNPSSSQVDEEQMNRVVEEEQQQQLRQQEEEHTARNGEVVGVEPRPGGQNDSQQGQLEENNNRFISVDEDSSGNQEEQEEDEEHAGEQDEEDEEEEEMDQESDDFDQSDDSSREDEHTHTNSVTNSSSIVDLPVHQLSSPFYTKTTKMKRKLDHGNEVRSFSLGKKPCKVSEYTSTTGLVPCSANPTTFGDLRAANGQGQQRRRITSVQPPTGLQEWLKMFQSWSGPEKLLALDELIDSCEPTQVKHMMQVIEPQFQRDFISLLPKELALYVLSFLEPKDLLQAAQTCRYWRILAEDNLLWREKCKEEGIDEPLHIKRRKVIKPGFIHSPWKSAYIRQHRIDTNSRRG

SEQ ID NO: 1842 - protein, 367 aa, synthetic construct
  source 1..367: note = FBXW7a.3
NQELLSVGSKRRRTGGSLRGNPSSSQVDEEQMNRVVEEEQQQQLRQQEEEHTARNGEVVGVEPRPGGQNDSQQGQLEENNNRFISVDEDSSGNQEEQEEDEEHAGEQDEEDEEEEEMDQESDDFDQSDDSSREDEHTHTNSVTNSSSIVDLPVHQLSSPFYTKTTKMKRKLDHGSEVRSFSLGKKPCKVSEYTSTTGLVPCSATPTTFGDLRAANGQGQQRRRINNVQPPTGLQEWLKMFQSWSGPEKLLALDELIDSCEPTQVKHMMQVIEPQFQRDFISLLPKELALYVLSFLEPKDLLQAAQTCRYWRILAEDNLLWREKCKEEGIDEPLHIKRRKVIKPGFIHSPWKSAYIRQHRIDTNSRRG

SEQ ID NO: 1843 - protein, 367 aa, synthetic construct
  source 1..367: note = FBXW7a.4
NQELLSVGNKRRRTGGNLRGNPSSSQVDEEQMNRVVEEEQQQQLRQQEEEHTARNGEVVGVEPRPGGQNDSQQGQLEENNNRFISVDEDSSGNQEEQEEDEEHAGEQDEEDEEEEEMDQESDDFDQSDDSSREDEHTHTNSVTNSSSIVDLPVHQLSSPFYTKTTKMKRKLDHGNEVRSFSLGKKPCKVSEYTSTTGLVPCSANPTTFGDLRAANGQGQQRRRINNVQPPTGLQEWLKMFQSWSGPEKLLALDELIDSCEPTQVKHMMQVIEPQFQRDFISLLPKELALYVLSFLEPKDLLQAAQTCRYWRILAEDNLLWREKCKEEGIDEPLHIKRRKVIKPGFIHSPWKSAYIRQHRIDTNSRRG

SEQ ID NO: 1844 - protein, 202 aa, synthetic construct
  source 1..202: note = FBXW7a.5
KMKRKLDHGSEVRSFSLGKKPCKVSEYTSTTGLVPCSATPTTFGDLRAANGQGQQRRRITSVQPPTGLQEWLKMFQSWSGPEKLLALDELIDSCEPTQVKHMMQVIEPQFQRDFISLLPKELALYVLSFLEPKDLLQAAQTCRYWRILAEDNLLWREKCKEEGIDEPLHIKRRKVIKPGFIHSPWKSAYIRQHRIDTNSRRG

SEQ ID NO: 1845 - protein, 202 aa, synthetic construct
  source 1..202: note = FBXW7a.6
KMKRKLDHGNEVRSFSLGKKPCKVSEYTSTTGLVPCSANPTTFGDLRAANGQGQQRRRITSVQPPTGLQEWLKMFQSWSGPEKLLALDELIDSCEPTQVKHMMQVIEPQFQRDFISLLPKELALYVLSFLEPKDLLQAAQTCRYWRILAEDNLLWREKCKEEGIDEPLHIKRRKVIKPGFIHSPWKSAYIRQHRIDTNSRRG

SEQ ID NO: 1846 - protein, 202 aa, synthetic construct
  source 1..202: note = FBXW7a.7
KMKRKLDHGSEVRSFSLGKKPCKVSEYTSTTGLVPCSATPTTFGDLRAANGQGQQRRRINNVQPPTGLQEWLKMFQSWSGPEKLLALDELIDSCEPTQVKHMMQVIEPQFQRDFISLLPKELALYVLSFLEPKDLLQAAQTCRYWRILAEDNLLWREKCKEEGIDEPLHIKRRKVIKPGFIHSPWKSAYIRQHRIDTNSRRG

SEQ ID NO: 1847 - protein, 202 aa, synthetic construct
  source 1..202: note = FBXW7a.8
KMKRKLDHGNEVRSFSLGKKPCKVSEYTSTTGLVPCSANPTTFGDLRAANGQGQQRRRINNVQPPTGLQEWLKMFQSWSGPEKLLALDELIDSCEPTQVKHMMQVIEPQFQRDFISLLPKELALYVLSFLEPKDLLQAAQTCRYWRILAEDNLLWREKCKEEGIDEPLHIKRRKVIKPGFIHSPWKSAYIRQHRIDTNSRRG

SEQ ID NO: 1848 - protein, 106 aa, synthetic construct
  source 1..106: note = FBXW7a.9
TQVKHMMQVIEPQFQRDFISLLPKELALYVLSFLEPKDLLQAAQTCRYWRILAEDNLLWREKCKEEGIDEPLHIKRRKVIKPGFIHSPWKSAYIRQHRIDTNSRRG

SEQ ID NO: 1849 - protein, 287 aa, synthetic construct; identical to SEQ ID NO: 39
  source 1..287: note = FBXW7b.1

SEQ ID NO: 1850 - protein, 287 aa, synthetic construct
  source 1..287: note = FBXW7b.2
CVPRSGLILSCICLYCGVLLPVLLPNLPFLTCLSMSTLESVTYLPEKGLYCQRLPSSRTHGGTESLKGKNTENMGFYGTLKMIFYKMKRKLDHGNEVRSFSLGKKPCKVSEYTSTTGLVPCSANPTTFGDLRAANGQGQQRRRITSVQPPTGLQEWLKMFQSWSGPEKLLALDELIDSCEPTQVKHMMQVIEPQFQRDFISLLPKELALYVLSFLEPKDLLQAAQTCRYWRILAEDNLLWREKCKEEGIDEPLHIKRRKVIKPGFIHSPWKSAYIRQHRIDTNSRRG

SEQ ID NO: 1851 - protein, 287 aa, synthetic construct
  source 1..287: note = FBXW7b.3
CVPRSGLILSCICLYCGVLLPVLLPNLPFLTCLSMSTLESVTYLPEKGLYCQRLPSSRTHGGTESLKGKNTENMGFYGTLKMIFYKMKRKLDHGSEVRSFSLGKKPCKVSEYTSTTGLVPCSATPTTFGDLRAANGQGQQRRRINNVQPPTGLQEWLKMFQSWSGPEKLLALDELIDSCEPTQVKHMMQVIEPQFQRDFISLLPKELALYVLSFLEPKDLLQAAQTCRYWRILAEDNLLWREKCKEEGIDEPLHIKRRKVIKPGFIHSPWKSAYIRQHRIDTNSRRG

SEQ ID NO: 1852 - protein, 287 aa, synthetic construct
  source 1..287: note = FBXW7b.4
CVPRSGLILSCICLYCGVLLPVLLPNLPFLTCLSMSTLESVTYLPEKGLYCQRLPSSRTHGGTESLKGKNTENMGFYGTLKMIFYKMKRKLDHGNEVRSFSLGKKPCKVSEYTSTTGLVPCSANPTTFGDLRAANGQGQQRRRINNVQPPTGLQEWLKMFQSWSGPEKLLALDELIDSCEPTQVKHMMQVIEPQFQRDFISLLPKELALYVLSFLEPKDLLQAAQTCRYWRILAEDNLLWREKCKEEGIDEPLHIKRRKVIKPGFIHSPWKSAYIRQHRIDTNSRRG

SEQ ID NO: 1853 - protein, 321 aa, synthetic construct; identical to SEQ ID NO: 41
  source 1..321: note = Keap1.1

SEQ ID NO: 1854 - protein, 228 aa, synthetic construct; identical to SEQ ID NO: 42
  source 1..228: note = SPOP.1

SEQ ID NO: 1855 - protein, 208 aa, synthetic construct
  source 1..208: note = SPOP.2
SVNISGQNTMNMVKVPECRLADELGGLWENSRFTDCCLCVAGQEFQAHKAILAARSPVFSAMFEHEMEESKKNRVEINDVEPEVFKEMMCFIYTGKAPNLDKMADDLLAAADKYALERLKVMCEDALCSNLSVENAAEILILADLHSADQLKTQAVDFINYHASDVLETSGWKSMVVSHPHLVAEAYRSLASAQCPFLGPPRKRLKQS

SEQ ID NO: 1856 - protein, 194 aa, synthetic construct
  source 1..194: note = SPOP.3
SVNISGQNTMNMVKVPECRLADELGGLWENSRFTDCCLCVAGQEFQAHKAILAARSPVFSAMFEHEMEESKKNRVEINDVEPEVFKEMMCFIYTGKAPNLDKMADDLLAAADKYALERLKVMCEDALCSNLSVENAAEILILADLHSADQLKTQAVDFINYHASDVLETSGWKSMVVSHPHLVAEAYRSLASAQ

SEQ ID NO: 1857 - protein, 42 aa, synthetic construct
  source 1..42: note = VIF.1
SESAIRNTILGRIVSPRCEYQAGHNKVGSLQYLALAALIKPK

SEQ ID NO: 1858 - protein, 92 aa, synthetic construct; identical to SEQ ID NO: 34
  source 1..92: note = NHLRC1.1

SEQ ID NO: 1859 - protein, 90 aa, synthetic construct
  source 1..90: note = NHLRC1.2
GPALHELMREAEISLLECKVCFEKFGHRQQRRPRNLSCGHVVCLACVAALAHPRTLALECPFCRRACRGCDTSDCLPVLHLIELLGSALR

SEQ ID NO: 1860 - protein, 90 aa, synthetic construct
  source 1..90: note = NHLRC1.3
GPALHELMREAEISLLESKVCFEKFGHRQQRRPRNLSCGHVVCLACVAALAHPRTLALECPFCRRACRGCDTSDCLPVLHLIELLGSALR

SEQ ID NO: 1861 - protein, 106 aa, synthetic construct
  source 1..106: note = NHLRC1.4
ESGPALHELMREAEISLLECKVCFEKFGHRQQRRPRNLSCGHVVCLACVAALAHPRTLALECPFCRRACRGCDTSDCLPVLHLIELLGSALRQSPAAHRAAPSAPG

SEQ ID NO: 1862 - protein, 88 aa, synthetic construct
  source 1..88: note = NHLRC1.5
ALHELMREAEISLLECKVCFEKFGHRQQRRPRNLSCGHVVCLACVAALAHPRTLALECPFCRRACRGCDTSDCLPVLHLIELLGSALR

SEQ ID NO: 1863 - protein, 54 aa, synthetic construct
  source 1..54: note = RNF11.1
RECVICMMDFVYGDPIRFLPCMHIYHLDCIDDWLMRSFTCPSCMEPVDAALLSS

SEQ ID NO: 1864 - protein, 61 aa, synthetic construct
  source 1..61: note = RNF111.1
TEEDTEEKCTICLSILEEGEDVRRLPCMHLFHQVCVDQWLITNKKCPICRVDIEAQLPSES

SEQ ID NO: 1865 - protein, 95 aa, synthetic construct; identical to SEQ ID NO: 30
  source 1..95: note = RNF114.1

SEQ ID NO: 1866 - protein, 45 aa, synthetic construct
  source 1..45: note = RNF115.1
LECPVCKEDYTVEEEVRQLPCNHFFHSSCIVPWLELHDTCPVCRK

SEQ ID NO: 1867 - protein, 69 aa, synthetic construct
  source 1..69: note = RNF12.1
GLTKEQIDNLAMRSFGENDALKTCSVCITEYTEGNKLRKLPCSHEYHVHCIDRWLSENSTCPICRRAVL

SEQ ID NO: 1868 - protein, 78 aa, synthetic construct
  source 1..78: note = RNF12.2
GLTKEQIDNLAMRSFGENDALKTCSVCITEYTEGNKLRKLPCSHEYHVHCIDRWLSENSTCPICRRAVLASGNRESVV

SEQ ID NO: 1869 - protein, 125 aa, synthetic construct
  source 1..125: note = RNF125.1
VLSTDSGKSAPASATARALERRRDPELPVTSFDCAVCLEVLHQPVRTRCGHVFCRSCIATSLKNNKWTCPYCRAYLPSEGVPATDVAKRMKSEYKNCAECDTLVCLSEMRAHIRTCQKYIDKYGP

SEQ ID NO: 1870 - protein, 96 aa, synthetic construct
  source 1..96: note = RNF125.2
TSFDCAVCLEVLHQPVRTRCGHVFCRSCIATSLKNNKWTCPYCRAYLPSEGVPATDVAKRMKSEYKNCAECDTLVCLSEMRAHIRTCQKYIDKYGP

SEQ ID NO: 1871 - protein, 94 aa, synthetic construct
  source 1..94: note = RNF125.3
FDCAVCLEVLHQPVRTRCGHVFCRSCIATSLKNNKWTCPYCRAYLPSEGVPATDVAKRMKSEYKNCAECDTLVCLSEMRAHIRTCQKYIDKYGP

SEQ ID NO: 1872 - protein, 96 aa, synthetic construct
  source 1..96: note = RNF125.4
TSFDCAVCLEVLHQPVRTRCGHVFCRSCIATSLKNNKWTCPYCRAYLPSEGVPATDVARRMKSEYKNCAECDTLVCLSEMRAHIRTCQRYIDKYGP

SEQ ID NO: 1873 - protein, 96 aa, synthetic construct
  source 1..96: note = RNF125.5
TSFDCAVCLEVLHQPVRTRCGHVFCRSCIATSLKNNKWTCPYCRAYLPSEGVPATDVAKRMKNENKNCAECDTLVCLNEMRAHIRTCQKYIDKYGP

SEQ ID NO: 1874 - protein, 96 aa, synthetic construct
  source 1..96: note = RNF125.6
TSFDCAVCLEVLHQPVRTRCGHVFCRSCIATSLKNNKWTCPYCRAYLPSEGVPATDVARRMKNENKNCAECDTLVCLNEMRAHIRTCQRYIDKYGP

SEQ ID NO: 1875 - protein, 96 aa, synthetic construct
  source 1..96: note = RNF125.7
TSFDCAVCLEVLHQPVRTRCGHVFCRSCIATSLKNNKWTAPYARAYLPSEGVPATDVAKRMKSEYKNCAECDTLVCLSEMRAHIRTCQKYIDKYGP

SEQ ID NO: 1876 - protein, 52 aa, synthetic construct
  source 1..52: note = RNF128.1
DSCAVCIELYKPNDLVRILTCNHIFHKTCVDPWLLEHRTCPMCKCDILKALG

SEQ ID NO: 1877 - protein, 100 aa, synthetic construct; identical to SEQ ID NO: 32
  source 1..100: note = RNF138.1

SEQ ID NO: 1878 - protein, 45 aa, synthetic construct
  source 1..45: note = RNF149.1
ENCAVCIENFKVKDIIRILPCKHIFHRICIDPWLLDHRTCPMCKL

SEQ ID NO: 1879 - protein, 47 aa, synthetic construct
  source 1..47: note = RNF152.1
LLECQICFNYYSPRRRPKLLDCKHTCCSVCLQQMRTSQKDVRCPWCR

SEQ ID NO: 1880 - protein, 81 aa, synthetic construct
  source 1..81: note = RNF165.1
NTIERFTFPHKYKKRRPQDGKGKKDEGEESDTDEKCTICLSMLEDGEDVRRLPCMHLFHQLCVDQWLAMSKKCPICRVDIE

SEQ ID NO: 1881 - protein, 101 aa, synthetic construct; identical to SEQ ID NO: 33
  source 1..101: note = RNF166.1

SEQ ID NO: 1882 - protein, 56 aa, synthetic construct
  source 1..56: note = RNF182.1
ECKICYNRYNLKQRKPKVLECCHRVCAKCLYKIIDFGDSPQGVIVCPFCRFETCLP

SEQ ID NO: 1883 - protein, 76 aa, synthetic construct
  source 1..76: note = RNF182.2
ELECKICYNRYNLKQRKPKVLECCHRVCAKCLYKIIDFGDSPQGVIVCPFCRFETCLPDDEVSSLPDDNNILVNLT

SEQ ID NO: 1884 - protein, 70 aa, synthetic construct
  source 1..70: note = RNF20.1
DEILMEEIKDYKARLTCPCCNMRKKDAVLTKCFHVFCFECVKTRYDTRQRKCPKCNAAFGANDFHRIYIG

SEQ ID NO: 1885 - protein, 126 aa, synthetic construct
  source 1..126: note = RNF25.1
NIPHGQCVICLYGFQEKEAFTKTPCYHYFHCHCLARYIQHMEQELKAQGQEQEQERQHATTKQKAVGVQCPVCREPLVYDLASLKAAPEPQQPMELYQPSAESLRQQEERKRLYQRQQERGGIIDL

SEQ ID NO: 1886 - protein, 61 aa, synthetic construct
  source 1..61: note = RNF4.1
VSCPICMDGYSEIVQNGRLIVSTECGHVFCSQCLRDSLKNANTCPTCRKKINHKRYHPIYI

SEQ ID NO: 1887 - protein, 69 aa, synthetic construct
  source 1..69: note = RNF6.1
EQIDNLSTRHYEHNSIDSELGKICSVCISDYVTGNKLRQLPCMHEFHIHCIDRWLSENCTCPICRQPVL

SEQ ID NO: 1888 - protein, 77 aa, synthetic construct
  source 1..77: note = RNF6.2
EQIDNLSTRHYEHNSIDSELGKICSVCISDYVTGNKLRQLPCMHEFHIHCIDRWLSENCTCPICRQPVLGSNIANNG

SEQ ID NO: 1889 - protein, 276 aa, synthetic construct
  source 1..276: note = TRIM21.1
ASAARLTMMWEEVTCPICLDPFVEPVSIECGHSFCQECISQVGKGGGSVCPVCRQRFLLKNLRPNRQLANMVNNLKEISQEAREGTQGERCAVHGERLHLFCEKDGKALCWVCAQSRKHRDHAMVPLEEAAQEYQEKLQVALGELRRKQELAEKLEVEIAIKRADWKKTVETQKSRIHAEFVQQKNFLVEEEQRQLQELEKDEREQLRILGEKEAKLAQQSQALQELISELDRRCHSSALELLQEVIIVLERSESWNLKDLDITSPELRSVCHVPG

SEQ ID NO: 1890 - protein, 128 aa, synthetic construct
  source 1..128: note = TRIM21.2
ASAARLTMMWEEVTCPICLDPFVEPVSIECGHSFCQECISQVGKGGGSVCPVCRQRFLLKNLRPNRQLANMVNNLKEISQEAREGTQGERCAVHGERLHLFCEKDGKALCWVCAQSRKHRDHAMVPLE

SEQ ID NO: 1891 - protein, 83 aa, synthetic construct
  source 1..83: note = TRIM21.3
ASAARLTMMWEEVTCPICLDPFVEPVSIECGHSFCQECISQVGKGGGSVCPVCRQRFLLKNLRPNRQLANMVNNLKEISQEAR

SEQ ID NO: 1892 - protein, 90 aa, synthetic construct
  source 1..90: note = TRIM32.1
SHLNLDALREVLECPICMESFTEEQLRPKLLHCGHTICRQCLEKLLASSINGVRCPFCSKITRITSLTQLTDNLTVLKIIDTAGLSEAVG

SEQ ID NO: 1893 - protein, 86 aa, synthetic construct
  source 1..86: note = ZNRF1.1
GFKCPICSKSVASDEMEMHFIMCLSKPRLSYNDDVLTKDAGECVICLEELLQGDTIARLPCLCIYHKSCIDSWFEVNRSCPEHPAD

SEQ ID NO: 1894 - protein, 48 aa, synthetic construct
  source 1..48: note = ZNRF4.1
DLCAICLDEYEEGDQLKILPCSHTYHCKCIDPWFSQAPRRSCPVCKQS

SEQ ID NO: 1895 - protein, 79 aa, synthetic construct; identical to SEQ ID NO: 35
  source 1..79: note = CBLb.1

SEQ ID NO: 1896 - protein, 10 aa, synthetic construct
  source 1..10: note = spNLS.2
GPPRKRLKQS

SEQ ID NO: 1897 - protein, 13 aa, synthetic construct
  source 1..13: note = spNLS
PFLGPPRKRLKQS

SEQ ID NO: 1898 - protein, 27 aa, synthetic construct
  source 1..27: note = hrpNLS
RSGGNHRRNGRGGRGGYNRRNNGYHPY

SEQ ID NO: 1899 - protein, 21 aa, synthetic construct
  source 1..21: note = bpNLS
GKRKLITSEEERSPAKRGRKS

SEQ ID NO: 1900 - protein, 20 aa, synthetic construct
  source 1..20: note = nlpNLS
AVKRPAATKKAGQAKKKKLD

SEQ ID NO: 1901 - protein, 21 aa, synthetic construct
  source 1..21: note = 3x(svNLS)
PKKKRKVPKKKRKVPKKKRKV

SEQ ID NO: 1902 - protein, 27 aa, synthetic construct
  source 1..27: note = 3x(mycNLS)
PAAKRVKLDPAAKRVKLDPAAKRVKLD

SEQ ID NO: 1903 - protein, 7 aa, synthetic construct
  source 1..7: note = svNLS
PKKKRKV

SEQ ID NO: 1904 - protein, 9 aa, synthetic construct
  source 1..9: note = mycNLS
PAAKRVKLD

SEQ ID NO: 1905 - protein, 9 aa, synthetic construct
  source 1..9: note = CHIP.NLS
RIAKKKRWN

SEQ ID NO: 1906 - protein, 9 aa, synthetic construct
  source 1..9: note = SPOP.NLS
PPRKRLKQS

SEQ ID NO: 1907 - protein, 18 aa, synthetic construct
  source 1..18: note = RNF165.NLS
PHKYKKRRPQDGKGKKDE

SEQ ID NO: 1908 - protein, 5 aa, synthetic construct
  source 1..5: note = FBXW7a.NLS
KRRRT

SEQ ID NO: 1909 - protein, 7 aa, synthetic construct
  source 1..7: note = NHLRC1.NLS
RQQRRPR

SEQ ID NO: 1910 - protein, 15 aa, synthetic construct
  source 1..15: note = NHLRC1.NES
CDTSDCLPVLHLIEL

SEQ ID NO: 1911 - protein, 15 aa, synthetic construct
  source 1..15: note = E6AP.NES
EGQFTLIGIVLGLAI

SEQ ID NO: 1912 - protein, 15 aa, synthetic construct
  source 1..15: note = Keap1.NES
RCKDYLVKIFEELTL

SEQ ID NO: 1913 - protein, 12 aa, synthetic construct
  source 1..12: note = RNF12.NES
GLTKEQIDNLAM

SEQ ID NO: 1914 - protein, 15 aa, synthetic construct
  source 1..15: note = RNF138.NES
CPERALDLENIMRKF

SEQ ID NO: 1915 - protein, 15 aa, synthetic construct
  source 1..15: note = RNF166.NES
GCNKKVTLAKMRVHI

SEQ ID NO: 1916 - protein, 15 aa, synthetic construct
  source 1..15: note = TRIM21.NES
RCHSSALELLQEVII

SEQ ID NO: 1917 - protein, 18 aa, synthetic construct
  source 1..18: note = TRIM32.NES
TRITSLTQLTDNLTVLKI

SEQ ID NO: 1918 - protein, 124 aa, synthetic construct
  source 1..124: note = mycV.0300 full
EVQLLESGGGLVQPGGSLRLSAAASGFTFADTDMGWFRQAPGKEREGVSAISGSGGNTYYADSVKGRFTISRDNSKNTLYLQMNSLRAEDTAVYYAAALGDYGDAIDYSEADYWGQGTQVTVSS

SEQ ID NO: 1919 - protein, 26 aa, synthetic construct
  source 1..26: note = mycV.0300 VH FR1
EVQLLESGGGLVQPGGSLRLSAAASG

SEQ ID NO: 1920 - protein, 9 aa, synthetic construct
  source 1..9: note = mycV.0300 VH CDR1
FTFADTDMG

SEQ ID NO: 1921 - protein, 14 aa, synthetic construct
  source 1..14: note = mycV.0300 VH FR2
WFRQAPGKEREGVS

SEQ ID NO: 1922 - protein, 17 aa, synthetic construct
  source 1..17: note = mycV.0300 VH CDR2
AISGSGGNTYYADSVKG

SEQ ID NO: 1923 - protein, 30 aa, synthetic construct
  source 1..30: note = mycV.0300 VH FR3
RFTISRDNSKNTLYLQMNSLRAEDTAVYYA

SEQ ID NO: 1924 - protein, 17 aa, synthetic construct
  source 1..17: note = mycV.0300 VH CDR3
AALGDYGDAIDYSEADY

SEQ ID NO: 1925 - protein, 11 aa, synthetic construct
  source 1..11: note = mycV.0300 VH FR4
WGQGTQVTVSS

SEQ ID NO: 1926 - protein, 122 aa, synthetic construct
  source 1..122: note = mycV.1300 full
EVQLLESGGGLVQPGGSLRLSAAASGFTFGDADMGWFRQAPGKEREGVSAISASGDSTYYADSVKGRFTISRDNSKNTLYLQMNSLRAEDTAVYYAAHLDQELTGASEHDYWGRGTQVTVSS

SEQ ID NO: 1927 - protein, 26 aa, synthetic construct
  source 1..26: note = mycV.1300 VH FR1
EVQLLESGGGLVQPGGSLRLSAAASG

SEQ ID NO: 1928 - protein, 9 aa, synthetic construct
  source 1..9: note = mycV.1300 VH CDR1
FTFGDADMG

SEQ ID NO: 1929 - protein, 14 aa, synthetic construct
  source 1..14: note = mycV.1300 VH FR2
WFRQAPGKEREGVS

SEQ ID NO: 1930 - protein, 17 aa, synthetic construct
  source 1..17: note = mycV.1300 VH CDR2
AISASGDSTYYADSVKG

SEQ ID NO: 1931 - protein, 30 aa, synthetic construct; identical to SEQ ID NO: 1923
  source 1..30: note = mycV.1300 VH FR3

SEQ ID NO: 1932 - protein, 15 aa, synthetic construct
  source 1..15: note = mycV.1300 VH CDR3
AHLDQELTGASEHDY

SEQ ID NO: 1933 - protein, 11 aa, synthetic construct
  source 1..11: note = mycV.1300 VH FR4
WGRGTQVTVSS

SEQ ID NO: 1934 - protein, 124 aa, synthetic construct
  source 1..124: note = mycV.1500 full
EVQLLESGGGLVQPGGSLRLSAAASGFTFADTDMGWFRQAPGKEREGVSAISGSGGSTYYADSVKGRFTISRDNSKNTLYLQMNSLRAEDTAVYYVAIIDDILTGGTFDEGDYWGRGTQVTVSS

SEQ ID NO: 1935 - protein, 26 aa, synthetic construct
  source 1..26: note = mycV.1500 VH FR1
EVQLLESGGGLVQPGGSLRLSAAASG

SEQ ID NO: 1936 - protein, 9 aa, synthetic construct
  source 1..9: note = mycV.1500 VH CDR1
FTFADTDMG

SEQ ID NO: 1937 - protein, 14 aa, synthetic construct
  source 1..14: note = mycV.1500 VH FR2
WFRQAPGKEREGVS

SEQ ID NO: 1938 - protein, 17 aa, synthetic construct
  source 1..17: note = mycV.1500 VH CDR2
AISGSGGSTYYADSVKG

SEQ ID NO: 1939 - protein, 30 aa, synthetic construct
  source 1..30: note = mycV.1500 VH FR3
RFTISRDNSKNTLYLQMNSLRAEDTAVYYV

SEQ ID NO: 1940 - protein, 17 aa, synthetic construct
  source 1..17: note = mycV.1500 VH CDR3
AIIDDILTGGTFDEGDY

SEQ ID NO: 1941 - protein, 11 aa, synthetic construct
  source 1..11: note = mycV.1500 VH FR4
WGRGTQVTVSS

SEQ ID NO: 1942 - protein, 121 aa, synthetic construct
  source 1..121: note = mycV.3700 full
EVQLLESGGGLVQPGGSLRLSAAASGFTFDVSDMGWFRQAPGKEREGVSAIGTEGDTYYADSVKGRFTISRDNSKNTLYLQMNSLRAEDTAVYYAAILPGELSLGNEYDYWGQGTQVTVSS

SEQ ID NO: 1943 - protein, 26 aa, synthetic construct
  source 1..26: note = mycV.3700 VH FR1
EVQLLESGGGLVQPGGSLRLSAAASG

SEQ ID NO: 1944 - protein, 9 aa, synthetic construct
  source 1..9: note = mycV.3700 VH CDR1
FTFDVSDMG

SEQ ID NO: 1945 - protein, 14 aa, synthetic construct
  source 1..14: note = mycV.3700 VH FR2
WFRQAPGKEREGVS

SEQ ID NO: 1946 - protein, 16 aa, synthetic construct
  source 1..16: note = mycV.3700 VH CDR2
AIGTEGDTYYADSVKG

SEQ ID NO: 1947 - protein, 30 aa, synthetic construct; identical to SEQ ID NO: 1923
  source 1..30: note = mycV.3700 VH FR3

SEQ ID NO: 1948 - protein, 15 aa, synthetic construct
  source 1..15: note = mycV.3700 VH CDR3
AILPGELSLGNEYDY

SEQ ID NO: 1949 - protein, 11 aa, synthetic construct
  source 1..11: note = mycV.3700 VH FR4
WGQGTQVTVSS

SEQ ID NO: 1950 - protein, 124 aa, synthetic construct
  source 1..124: note = mycV.6600 full
EVQLLESGGGLVQPGGSLRLSCAASGFTFSSYAMSWFRQAPGKEREGVSAISGSGGSTYYADSVKGRFTISRDNSKNTLYLQMNSLRAEDTAVYYCATLDEYSGFGGASEADYWGQGTQVTVSS

SEQ ID NO: 1951 - protein, 26 aa, synthetic construct
  source 1..26: note = mycV.6600 VH FR1
EVQLLESGGGLVQPGGSLRLSCAASG

SEQ ID NO: 1952 - protein, 9 aa, synthetic construct
  source 1..9: note = mycV.6600 VH CDR1
FTFSSYAMS

SEQ ID NO: 1953 - protein, 14 aa, synthetic construct
  source 1..14: note = mycV.6600 VH FR2
WFRQAPGKEREGVS

SEQ ID NO: 1954 - protein, 17 aa, synthetic construct
  source 1..17: note = mycV.6600 VH CDR2
AISGSGGSTYYADSVKG

SEQ ID NO: 1955 - protein, 30 aa, synthetic construct
  source 1..30: note = mycV.6600 VH FR3
RFTISRDNSKNTLYLQMNSLRAEDTAVYYC

SEQ ID NO: 1956 - protein, 17 aa, synthetic construct
  source 1..17: note = mycV.6600 VH CDR3
ATLDEYSGFGGASEADY

SEQ ID NO: 1957 - protein, 11 aa, synthetic construct
  source 1..11: note = mycV.6600 VH FR4
WGQGTQVTVSS

SEQ ID NO: 1958 - protein, 124 aa, synthetic construct
  source 1..124: note = mycV.1516 full
EVQLLESGGGLVQPGGSLRLSVAASGFTFADTDMGWFRQAPGKEREGVSAISGSGGSTYYADSVKGRFTISRDNSKNTLYLQMNSLRAEDTAVYYAAIIDDILTGGTFDEGDYWGRGTQVTVSS

SEQ ID NO: 1959 - protein, 26 aa, synthetic construct
  source 1..26: note = mycV.1516 VH FR1
EVQLLESGGGLVQPGGSLRLSAAASG

SEQ ID NO: 1960 - protein, 9 aa, synthetic construct
  source 1..9: note = mycV.1516 VH CDR1
FTFADTDMG

SEQ ID NO: 1961 - protein, 14 aa, synthetic construct
  source 1..14: note = mycV.1516 VH FR2
WFRQAPGKEREGVS

SEQ ID NO: 1962 - protein, 17 aa, synthetic construct
  source 1..17: note = mycV.1516 VH CDR2
AISGSGGSTYYADSVKG

SEQ ID NO: 1963 - protein, 30 aa, synthetic construct; identical to SEQ ID NO: 1939
  source 1..30: note = mycV.1516 VH FR3

SEQ ID NO: 1964 - protein, 17 aa, synthetic construct
  source 1..17: note = mycV.1516 VH CDR3
AIIDDILTGGTFDEGDY

SEQ ID NO: 1965 - protein, 11 aa, synthetic construct
  source 1..11: note = mycV.1516 VH FR4
WGRGTQVTVSS

SEQ ID NO: 1966 - protein, 124 aa, synthetic construct
  source 1..124: note = mycV.1515 full
EVQLLESGGGLVQPGGSLRLSAAASGFTFADTDMGWFRQAPGKEREGVSAISGSGGSTYYADSVKGRFTISRDNSKNTLYLQMNSLRAEDTAVYYAAIIDDILTGGTFDEGDYWGRGTQVTVSS

SEQ ID NO: 1967 - protein, 26 aa, synthetic construct
  source 1..26: note = mycV.1515 VH FR1
EVQLLESGGGLVQPGGSLRLSAAASG

SEQ ID NO: 1968 - protein, 9 aa, synthetic construct
  source 1..9: note = mycV.1515 VH CDR1
FTFADTDMG

SEQ ID NO: 1969 - protein, 14 aa, synthetic construct
  source 1..14: note = mycV.1515 VH FR2
WFRQAPGKEREGVS

SEQ ID NO: 1970 - protein, 17 aa, synthetic construct
  source 1..17: note = mycV.1515 VH CDR2
AISGSGGSTYYADSVKG

SEQ ID NO: 1971 - protein, 30 aa, synthetic construct; identical to SEQ ID NO: 1939
  source 1..30: note = mycV.1515 VH FR3

SEQ ID NO: 1972 - protein, 17 aa, synthetic construct
  source 1..17: note = mycV.1515 VH CDR3
AIIDDILTGGTFDEGDY

SEQ ID NO: 1973 - protein, 11 aa, synthetic construct
  source 1..11: note = mycV.1515 VH FR4
WGRGTQVTVSS

SEQ ID NO: 1974 - protein, 124 aa, synthetic construct
  source 1..124: note = mycV.1514 full
EVQLLESGGGLVQPGGSLRLSVAASGFTFADTDMGWFRQAPGKEREGVSAISGSGGSTYYADSVKGRFTISRDNSKNTLYLQMNSLRAEDTAVYYVAIIDDILTGGTFDEGDYWGRGTQVTVSS

SEQ ID NO: 1975 - protein, 26 aa, synthetic construct
  source 1..26: note = mycV.1514 VH FR1
EVQLLESGGGLVQPGGSLRLSAAASG

SEQ ID NO: 1976 - protein, 9 aa, synthetic construct
  source 1..9: note = mycV.1514 VH CDR1
FTFADTDMG

SEQ ID NO: 1977 - protein, 14 aa, synthetic construct
  source 1..14: note = mycV.1514 VH FR2
WFRQAPGKEREGVS

SEQ ID NO: 1978 - protein, 17 aa, synthetic construct
  source 1..17: note = mycV.1514 VH CDR2
AISGSGGSTYYADSVKG

SEQ ID NO: 1979 - protein, 30 aa, synthetic construct; identical to SEQ ID NO: 1939
  source 1..30: note = mycV.1514 VH FR3

SEQ ID NO: 1980 - protein, 17 aa, synthetic construct
  source 1..17: note = mycV.1514 VH CDR3
AIIDDILTGGTFDEGDY

SEQ ID NO: 1981 - protein, 11 aa, synthetic construct
  source 1..11: note = mycV.1514 VH FR4
WGRGTQVTVSS

SEQ ID NO: 1982 - protein, 124 aa, synthetic construct
  source 1..124: note = mycV.1513 full
EVQLLESGGGLVQPGGSLRLSVAASGFTFADTDMGWFRQAPGKEREGVSAISGSGGSTYYADSVKGRFTISRDNSKNTLYLQMNSLRAEDTAVYYCAIIDDILTGGTFDEGDYWGRGTQVTVSS

SEQ ID NO: 1983 - protein, 26 aa, synthetic construct
  source 1..26: note = mycV.1513 VH FR1
EVQLLESGGGLVQPGGSLRLSAAASG

SEQ ID NO: 1984 - protein, 9 aa, synthetic construct
  source 1..9: note = mycV.1513 VH CDR1
FTFADTDMG

SEQ ID NO: 1985 - protein, 14 aa, synthetic construct
  source 1..14: note = mycV.1513 VH FR2
WFRQAPGKEREGVS

SEQ ID NO: 1986 - protein, 17 aa, synthetic construct
  source 1..17: note = mycV.1513 VH CDR2
AISGSGGSTYYADSVKG

SEQ ID NO: 1987 - protein, 30 aa, synthetic construct; identical to SEQ ID NO: 1939
  source 1..30: note = mycV.1513 VH FR3

SEQ ID NO: 1988 - protein, 17 aa, synthetic construct
  source 1..17: note = mycV.1513 VH CDR3
AIIDDILTGGTFDEGDY

SEQ ID NO: 1989 - protein, 11 aa, synthetic construct
  source 1..11: note = mycV.1513 VH FR4
WGRGTQVTVSS

SEQ ID NO: 1990 - protein, 124 aa, synthetic construct
  source 1..124: note = mycV.1512 full
EVQLLESGGGLVQPGGSLRLSCAASGFTFADTDMGWFRQAPGKEREGVSAISGSGGSTYYADSVKGRFTISRDNSKNTLYLQMNSLRAEDTAVYYAAIIDDILTGGTFDEGDYWGRGTQVTVSS

SEQ ID NO: 1991 - protein, 26 aa, synthetic construct
  source 1..26: note = mycV.1512 VH FR1
EVQLLESGGGLVQPGGSLRLSAAASG

SEQ ID NO: 1992 - protein, 9 aa, synthetic construct
  source 1..9: note = mycV.1512 VH CDR1
FTFADTDMG

SEQ ID NO: 1993 - protein, 14 aa, synthetic construct
  source 1..14: note = mycV.1512 VH FR2
WFRQAPGKEREGVS

SEQ ID NO: 1994 - protein, 17 aa, synthetic construct
  source 1..17: note = mycV.1512 VH CDR2
AISGSGGSTYYADSVKG

SEQ ID NO: 1995 - protein, 30 aa, synthetic construct; identical to SEQ ID NO: 1939
  source 1..30: note = mycV.1512 VH FR3

SEQ ID NO: 1996 - protein, 17 aa, synthetic construct
  source 1..17: note = mycV.1512 VH CDR3
AIIDDILTGGTFDEGDY

SEQ ID NO: 1997 - protein, 11 aa, synthetic construct
  source 1..11: note = mycV.1512 VH FR4
WGRGTQVTVSS

SEQ ID NO: 1998 - protein, 124 aa, synthetic construct
  source 1..124: note = mycV.1511 full
EVQLLESGGGLVQPGGSLRLSAAASGFTFADTDMGWFRQAPGKEREGVSAISGSGGSTYYADSVKGRFTISRDNSKNTLYLQMNSLRAEDTAVYYCAIIDDILTGGTFDEGDYWGRGTQVTVSS

SEQ ID NO: 1999 - protein, 26 aa, synthetic construct
  source 1..26: note = mycV.1511 VH FR1
EVQLLESGGGLVQPGGSLRLSAAASG

SEQ ID NO: 2000 - protein, 9 aa, synthetic construct
  source 1..9: note = mycV.1511 VH CDR1
FTFADTDMG

SEQ ID NO: 2001 - protein, 14 aa, synthetic construct
  source 1..14: note = mycV.1511 VH FR2
WFRQAPGKEREGVS

SEQ ID NO: 2002 - protein, 17 aa, synthetic construct
  source 1..17: note = mycV.1511 VH CDR2
AISGSGGSTYYADSVKG

SEQ ID NO: 2003 - protein, 30 aa, synthetic construct; identical to SEQ ID NO: 1939
  source 1..30: note = mycV.1511 VH FR3

SEQ ID NO: 2004 - protein, 17 aa, synthetic construct
  source 1..17: note = mycV.1511 VH CDR3
AIIDDILTGGTFDEGDY

SEQ ID NO: 2005 - protein, 11 aa, synthetic construct
  source 1..11: note = mycV.1511 VH FR4
WGRGTQVTVSS

SEQ ID NO: 2006 - protein, 124 aa, synthetic construct
  source 1..124: note = mycV.1510 full
EVQLLESGGGLVQPGGSLRLSCAASGFTFADTDMGWFRQAPGKEREGVSAISGSGGSTYYADSVKGRFTISRDNSKNTLYLQMNSLRAEDTAVYYVAIIDDILTGGTFDEGDYWGRGTQVTVSS

SEQ ID NO: 2007 - protein, 26 aa, synthetic construct
  source 1..26: note = mycV.1510 VH FR1
EVQLLESGGGLVQPGGSLRLSAAASG

SEQ ID NO: 2008 - protein, 9 aa, synthetic construct
  source 1..9: note = mycV.1510 VH CDR1
FTFADTDMG

SEQ ID NO: 2009 - protein, 14 aa, synthetic construct
  source 1..14: note = mycV.1510 VH FR2
WFRQAPGKEREGVS

SEQ ID NO: 2010 - protein, 17 aa, synthetic construct
  source 1..17: note = mycV.1510 VH CDR2
AISGSGGSTYYADSVKG

SEQ ID NO: 2011 - protein, 30 aa, synthetic construct; identical to SEQ ID NO: 1939
  source 1..30: note = mycV.1510 VH FR3

SEQ ID NO: 2012 - protein, 17 aa, synthetic construct
  source 1..17: note = mycV.1510 VH CDR3
AIIDDILTGGTFDEGDY

SEQ ID NO: 2013 - protein, 11 aa, synthetic construct
  source 1..11: note = mycV.1510 VH FR4
WGRGTQVTVSS

SEQ ID NO: 2014 - protein, 124 aa, synthetic construct
  source 1..124: note = mycV.1509 full
EVQLLESGGGLVQPGGSLRLSCAASGFTFADTDMGWFRQAPGKEREGVSAISGSGGSTYYADSVKGRFTISRDNSKNTLYLQMNSLRAEDTAVYYCAIIDDILTGGTFDEGDYWGRGTQVTVSS

SEQ ID NO: 2015 - protein, 26 aa, synthetic construct
  source 1..26: note = mycV.1509 VH FR1
EVQLLESGGGLVQPGGSLRLSAAASG

SEQ ID NO: 2016 - protein, 9 aa, synthetic construct
  source 1..9: note = mycV.1509 VH CDR1
FTFADTDMG

SEQ ID NO: 2017 - protein, 14 aa, synthetic construct
  source 1..14: note = mycV.1509 VH FR2
WFRQAPGKEREGVS

SEQ ID NO: 2018 - protein, 17 aa, synthetic construct
  source 1..17: note = mycV.1509 VH CDR2
AISGSGGSTYYADSVKG

SEQ ID NO: 2019 - protein, 30 aa, synthetic construct; identical to SEQ ID NO: 1939
  source 1..30: note = mycV.1509 VH FR3

SEQ ID NO: 2020 - protein, 17 aa, synthetic construct
  source 1..17: note = mycV.1509 VH CDR3
AIIDDILTGGTFDEGDY

SEQ ID NO: 2021 - protein, 11 aa, synthetic construct
  source 1..11: note = mycV.1509 VH FR4
WGRGTQVTVSS

SEQ ID NO: 2022 - protein, 124 aa, synthetic construct
  source 1..124: note = mycV.1508 full
EVQLLESGGGLVQPGGSLRLSAAASGFTFADTDMGWFRQAPGREREGVSAISGSGGSTYYADSVKGRFTISRDNSANTLYLQMNSLRAEDTAVYYVAIIDDILTGGTFDEGDYWGRGTQVTVSS

SEQ ID NO: 2023 - protein, 26 aa, synthetic construct
  source 1..26: note = mycV.1508 VH FR1
EVQLLESGGGLVQPGGSLRLSAAASG

SEQ ID NO: 2024 - protein, 9 aa, synthetic construct
  source 1..9: note = mycV.1508 VH CDR1
FTFADTDMG

SEQ ID NO: 2025 - protein, 14 aa, synthetic construct
  source 1..14: note = mycV.1508 VH FR2
WFRQAPGKEREGVS

SEQ ID NO: 2026 - protein, 17 aa, synthetic construct
  source 1..17: note = mycV.1508 VH CDR2
AISGSGGSTYYADSVKG

SEQ ID NO: 2027 - protein, 30 aa, synthetic construct; identical to SEQ ID NO: 1939
  source 1..30: note = mycV.1508 VH FR3

SEQ ID NO: 2028 - protein, 17 aa, synthetic construct
  source 1..17: note = mycV.1508 VH CDR3
AIIDDILTGGTFDEGDY

SEQ ID NO: 2029 - protein, 11 aa, synthetic construct
  source 1..11: note = mycV.1508 VH FR4
WGRGTQVTVSS

SEQ ID NO: 2030 - protein, 124 aa, synthetic construct
  source 1..124: note = mycV.1507 full
EVQLLESGGGLVQPGGSLRLSAAASGFTFADTDMGWFRQAPGAEREGVSAISGSGGSTYYADSVKGRFTISRDNSRNTLYLQMNSLRAEDTAVYYVAIIDDILTGGTFDEGDYWGRGTQVTVSS

SEQ ID NO: 2031 - protein, 26 aa, synthetic construct
  source 1..26: note = mycV.1507 VH FR1
EVQLLESGGGLVQPGGSLRLSAAASG

SEQ ID NO: 2032 - protein, 9 aa, synthetic construct
  source 1..9: note = mycV.1507 VH CDR1
FTFADTDMG

SEQ ID NO: 2033 - protein, 14 aa, synthetic construct
  source 1..14: note = mycV.1507 VH FR2
WFRQAPGKEREGVS

SEQ ID NO: 2034 - protein, 17 aa, synthetic construct
  source 1..17: note = mycV.1507 VH CDR2
AISGSGGSTYYADSVKG

SEQ ID NO: 2035 - protein, 30 aa, synthetic construct; identical to SEQ ID NO: 1939
  source 1..30: note = mycV.1507 VH FR3

SEQ ID NO: 2036 - protein, 17 aa, synthetic construct
  source 1..17: note = mycV.1507 VH CDR3
AIIDDILTGGTFDEGDY

SEQ ID NO: 2037 - protein, 11 aa, synthetic construct
  source 1..11: note = mycV.1507 VH FR4
WGRGTQVTVSS

SEQ ID NO: 2038 - protein, 124 aa, synthetic construct
  source 1..124: note = mycV.1506 full
EVQLLESGGGLVQPGGSLRLSAAASGFTFADTDMGWFRQAPGREREGVSAISGSGGSTYYADSVKGRFTISRDNSRNTLYLQMNSLRAEDTAVYYVAIIDDILTGGTFDEGDYWGRGTQVTVSS

SEQ ID NO: 2039 - protein, 26 aa, synthetic construct
  source 1..26: note = mycV.1506 VH FR1
EVQLLESGGGLVQPGGSLRLSAAASG

SEQ ID NO: 2040 - protein, 9 aa, synthetic construct
  source 1..9: note = mycV.1506 VH CDR1
FTFADTDMG

SEQ ID NO: 2041 - protein, 14 aa, synthetic construct
  source 1..14: note = mycV.1506 VH FR2
WFRQAPGKEREGVS

SEQ ID NO: 2042 - protein, 17 aa, synthetic construct
  source 1..17: note = mycV.1506 VH CDR2
AISGSGGSTYYADSVKG

SEQ ID NO: 2043 - protein, 30 aa, synthetic construct; identical to SEQ ID NO: 1939
  source 1..30: note = mycV.1506 VH FR3

SEQ ID NO: 2044 - protein, 17 aa, synthetic construct
  source 1..17: note = mycV.1506 VH CDR3
AIIDDILTGGTFDEGDY

SEQ ID NO: 2045 - protein, 11 aa, synthetic construct
  source 1..11: note = mycV.1506 VH FR4
WGRGTQVTVSS

SEQ ID NO: 2046 - protein, 124 aa, synthetic construct
  source 1..124: note = mycV.1505 full
EVQLLESGGGLVQPGGSLRLSAAASGFTFADTDMGWFRQAPGAEREGVSAISGSGGSTYYADSVKGRFTISRDNSANTLYLQMNSLRAEDTAVYYVAIIDDILTGGTFDEGDYWGRGTQVTVSS

SEQ ID NO: 2047 - protein, 26 aa, synthetic construct
  source 1..26: note = mycV.1505 VH FR1
EVQLLESGGGLVQPGGSLRLSAAASG

SEQ ID NO: 2048 - protein, 9 aa, synthetic construct
  source 1..9: note = mycV.1505 VH CDR1
FTFADTDMG

SEQ ID NO: 2049 - protein, 14 aa, synthetic construct
  source 1..14: note = mycV.1505 VH FR2
WFRQAPGKEREGVS

SEQ ID NO: 2050 - protein, 17 aa, synthetic construct
  source 1..17: note = mycV.1505 VH CDR2
AISGSGGSTYYADSVKG

SEQ ID NO: 2051 - protein, 30 aa, synthetic construct; identical to SEQ ID NO: 1939
  source 1..30: note = mycV.1505 VH FR3

SEQ ID NO: 2052 - protein, 17 aa, synthetic construct
  source 1..17: note = mycV.1505 VH CDR3
AIIDDILTGGTFDEGDY

SEQ ID NO: 2053 - protein, 11 aa, synthetic construct
  source 1..11: note = mycV.1505 VH FR4
WGRGTQVTVSS

SEQ ID NO: 2054 - protein, 124 aa, synthetic construct
  source 1..124: note = mycV.1504 full
EVQLLESGGGLVQPGGSLRLSAAASGFTFADTDMGWFRQAPGKEREGVSAISGSGGSTYYADSVKGRFTISRDNSRNTLYLQMNSLRAEDTAVYYVAIIDDILTGGTFDEGDYWGRGTQVTVSS

SEQ ID NO: 2055 - protein, 26 aa, synthetic construct
  source 1..26: note = mycV.1504 VH FR1
EVQLLESGGGLVQPGGSLRLSAAASG

SEQ ID NO: 2056 - protein, 9 aa, synthetic construct
  source 1..9: note = mycV.1504 VH CDR1
FTFADTDMG

SEQ ID NO: 2057 - protein, 14 aa, synthetic construct
  source 1..14: note = mycV.1504 VH FR2
WFRQAPGKEREGVS

SEQ ID NO: 2058 - protein, 17 aa, synthetic construct
  source 1..17: note = mycV.1504 VH CDR2
AISGSGGSTYYADSVKG

SEQ ID NO: 2059 - protein, 30 aa, synthetic construct; identical to SEQ ID NO: 1939
  source 1..30: note = mycV.1504 VH FR3

SEQ ID NO: 2060 - protein, 17 aa, synthetic construct
  source 1..17: note = mycV.1504 VH CDR3
AIIDDILTGGTFDEGDY

SEQ ID NO: 2061 - protein, 11 aa, synthetic construct
  source 1..11: note = mycV.1504 VH FR4
WGRGTQVTVSS

SEQ ID NO: 2062 - protein, 124 aa, synthetic construct
  source 1..124: note = mycV.1503 full
EVQLLESGGGLVQPGGSLRLSAAASGFTFADTDMGWFRQAPGKEREGVSAISGSGGSTYYADSVKGRFTISRDNSANTLYLQMNSLRAEDTAVYYVAIIDDILTGGTFDEGDYWGRGTQVTVSS

SEQ ID NO: 2063 - protein, 26 aa, synthetic construct
  source 1..26: note = mycV.1503 VH FR1
EVQLLESGGGLVQPGGSLRLSAAASG

SEQ ID NO: 2064 - protein, 9 aa, synthetic construct
  source 1..9: note = mycV.1503 VH CDR1
FTFADTDMG

SEQ ID NO: 2065 - protein, 14 aa, synthetic construct
  source 1..14: note = mycV.1503 VH FR2
WFRQAPGKEREGVS

SEQ ID NO: 2066 - protein, 17 aa, synthetic construct
  source 1..17: note = mycV.1503 VH CDR2
AISGSGGSTYYADSVKG

SEQ ID NO: 2067 - protein, 30 aa, synthetic construct; identical to SEQ ID NO: 1939
  source 1..30: note = mycV.1503 VH FR3

SEQ ID NO: 2068 - protein, 17 aa, synthetic construct
  source 1..17: note = mycV.1503 VH CDR3
AIIDDILTGGTFDEGDY

SEQ ID NO: 2069 - protein, 11 aa, synthetic construct
  source 1..11: note = mycV.1503 VH FR4
WGRGTQVTVSS

SEQ ID NO: 2070 - protein, 124 aa, synthetic construct
  source 1..124: note = mycV.1502 full
EVQLLESGGGLVQPGGSLRLSAAASGFTFADTDMGWFRQAPGREREGVSAISGSGGSTYYADSVKGRFTISRDNSKNTLYLQMNSLRAEDTAVYYVAIIDDILTGGTFDEGDYWGRGTQVTVSS

SEQ ID NO: 2071 - protein, 26 aa, synthetic construct
  source 1..26: note = mycV.1502 VH FR1
EVQLLESGGGLVQPGGSLRLSAAASG

SEQ ID NO: 2072 - protein, 9 aa, synthetic construct
  source 1..9: note = mycV.1502 VH CDR1
FTFADTDMG

SEQ ID NO: 2073 - protein, 14 aa, synthetic construct
  source 1..14: note = mycV.1502 VH FR2
WFRQAPGKEREGVS

SEQ ID NO: 2074 - protein, 17 aa, synthetic construct
  source 1..17: note = mycV.1502 VH CDR2
AISGSGGSTYYADSVKG

SEQ ID NO: 2075 - protein, 30 aa, synthetic construct; identical to SEQ ID NO: 1939
  source 1..30: note = mycV.1502 VH FR3

SEQ ID NO: 2076 - protein, 17 aa, synthetic construct
  source 1..17: note = mycV.1502 VH CDR3
AIIDDILTGGTFDEGDY

SEQ ID NO: 2077 - protein, 11 aa, synthetic construct
  source 1..11: note = mycV.1502 VH FR4
WGRGTQVTVSS

SEQ ID NO: 2078 - protein, 124 aa, synthetic construct
  source 1..124: note = mycV.1501 full
EVQLLESGGGLVQPGGSLRLSAAASGFTFADTDMGWFRQAPGAEREGVSAISGSGGSTYYADSVKGRFTISRDNSKNTLYLQMNSLRAEDTAVYYVAIIDDILTGGTFDEGDYWGRGTQVTVSS

SEQ ID NO: 2079 - protein, 26 aa, synthetic construct
  source 1..26: note = mycV.1501 VH FR1
EVQLLESGGGLVQPGGSLRLSAAASG

SEQ ID NO: 2080 - protein, 9 aa, synthetic construct
  source 1..9: note = mycV.1501 VH CDR1
FTFADTDMG

SEQ ID NO: 2081 - protein, 14 aa, synthetic construct
  source 1..14: note = mycV.1501 VH FR2
WFRQAPGKEREGVS

SEQ ID NO: 2082 - protein, 17 aa, synthetic construct
  source 1..17: note = mycV.1501 VH CDR2
AISGSGGSTYYADSVKG

SEQ ID NO: 2083 - protein, 30 aa, synthetic construct; identical to SEQ ID NO: 1939
  source 1..30: note = mycV.1501 VH FR3

SEQ ID NO: 2084 - protein, 17 aa, synthetic construct
  source 1..17: note = mycV.1501 VH CDR3
AIIDDILTGGTFDEGDY

SEQ ID NO: 2085 - protein, 11 aa, synthetic construct
  source 1..11: note = mycV.1501 VH FR4
WGRGTQVTVSS

SEQ ID NO: 2086 - protein, 92 aa, synthetic construct; identical to SEQ ID NO: 6
  source 1..92: note = OMOMYC

SEQ ID NO: 2087 - protein, 114 aa, synthetic construct; identical to SEQ ID NO: 9
  source 1..114: note = VL12.3 full

SEQ ID NO: 2088 - protein, 24 aa, synthetic construct
  source 1..24: note = VL12.3 VL FR1
GSQPVLTQSPSVSAAPRQRVTISV

SEQ ID NO: 2089 - protein, 9 aa, synthetic construct
  source 1..9: note = VL12.3 VL CDR1
SGSNSNIGS

SEQ ID NO: 2090 - protein, 17 aa, synthetic construct
  source 1..17: note = VL12.3 VL FR2
NTVNWIQQLPGRAPELL

SEQ ID NO: 2091 - protein, 7 aa, synthetic construct
  source 1..7: note = VL12.3 VL CDR2
MYDDDLL

SEQ ID NO: 2092 - protein, 35 aa, synthetic construct
  source 1..35: note = VL12.3 VL FR3
APGVSDRFSGSRSGTSASLTISGLQSEDEADYYAA

SEQ ID NO: 2093 - protein, 10 aa, synthetic construct
  source 1..10: note = VL12.3 VL CDR3
TWDDSLNGWV

SEQ ID NO: 2094 - protein, 12 aa, synthetic construct
  source 1..12: note = VL12.3 VL FR4
FGGGTKVTVLSG

SEQ ID NO: 2095 - protein, 251 aa, synthetic construct; identical to SEQ ID NO: 10
  source 1..251: note = INT41 full

SEQ ID NO: 2096 - protein, 5 aa, synthetic construct
  source 1..5: note = INT41 VH FR1
AEVQL

SEQ ID NO: 2097 - protein, 6 aa, synthetic construct
  source 1..6: note = INT41 VH CDR1
VVSGGG

SEQ ID NO: 2098 - protein, 37 aa, synthetic construct
  source 1..37: note = INT41 VH FR2
LVKPGGSMILSCAASGFTFSNYSMNWVRQAPGKGLEW

SEQ ID NO: 2099 - protein, 9 aa, synthetic construct
  source 1..9: note = INT41 VH CDR2
VSSISSSSE

SEQ ID NO: 2100 - protein, 41 aa, synthetic construct
  source 1..41: note = INT41 VH FR3
YIYYADFVKGRFTISRDNAKNSLYLQMDSLRAEDTAVYYCA

SEQ ID NO: 2101 - protein, 7 aa, synthetic construct
  source 1..7: note = INT41 VH CDR3
WPGYRKA

SEQ ID NO: 2102 - protein, 11 aa, synthetic construct
  source 1..11: note = INT41 VH FR4
WGRGTLVTVSS

SEQ ID NO: 2103 - protein, 13 aa, synthetic construct
  source 1..13: note = INT41 linker
GGGGSGGGGSGGG

SEQ ID NO: 2104 - protein, 24 aa, synthetic construct
  source 1..24: note = INT41 VL FR1
GSQSVLTQPASVSGSPGQSITISC

SEQ ID NO: 2105 - protein, 10 aa, synthetic construct
  source 1..10: note = INT41 VL CDR1
AGTSSDVGGY

SEQ ID NO: 2106 - protein, 17 aa, synthetic construct
  source 1..17: note = INT41 VL FR2
NYVSWYQQHPGKAPKLM

SEQ ID NO: 2107 - protein, 7 aa, synthetic construct
  source 1..7: note = INT41 VL CDR2
IYEDSKR

SEQ ID NO: 2108 - protein, 34 aa, synthetic construct
  source 1..34: note = INT41 VL FR3
PSGVSNRFSGSKSGNTASLTISGLRAEDEADYYC

SEQ ID NO: 2109 - protein, 10 aa, synthetic construct
  source 1..10: note = INT41 VL CDR3
SYCASKGHWL

SEQ ID NO: 2110 - protein, 20 aa, synthetic construct
  source 1..20: note = INT41 VL FR4
FGGGTKLAVLGAAAEQKLIS

SEQ ID NO: 2111 - protein, 87 aa, synthetic construct; identical to SEQ ID NO: 7
  source 1..87: note = FOXP3 DBD

SEQ ID NO: 2112 - protein, 45 aa, synthetic construct; identical to SEQ ID NO: 11
  source 1..45: note = TCF4.1

SEQ ID NO: 2113 - protein, 34 aa, synthetic construct
  source 1..34: note = TCF4.10
DDLGANDELISFRDEGEQEEAERDLADVRSSLVN

SEQ ID NO: 2114 - protein, 37 aa, synthetic construct
  source 1..37: note = TCF4.11
DDLGANDELISFRDEGEQEAERDLADVKSSLVNESET

SEQ ID NO: 2115 - protein, 34 aa, synthetic construct
  source 1..34: note = TCF4.12
DDLGANDELISFKDEGEQEEAERDLADVKSSLVN

SEQ ID NO: 2116 - protein, 38 aa, synthetic construct
  source 1..38: note = TCF4.14
DDLGANRELASAKDEGEQEEAERDAADVRSSAVNESET

SEQ ID NO: 2117 - protein, 33 aa, synthetic construct
  source 1..33: note = TCF4.15
DDLGANDELISFKDEGEQEAERDLADVKSSLVN

SEQ ID NO: 2118 - protein, 34 aa, synthetic construct
  source 1..34: note = TCF4.16
DDLGANDELISFRDEGEQEEAERDLADVKSSLVN

SEQ ID NO: 2119 - protein, 38 aa, synthetic construct
  source 1..38: note = TCF4.2
DDLGANDELISFKDEGEQEEAERDLADVKSSLVNESET

SEQ ID NO: 2120 - protein, 45 aa, synthetic construct
  source 1..45: note = TCF4.3
DDLGANDELISFKDEGEQEEKSSENSSAERDLADVRSSLVNESET

SEQ ID NO: 2121 - protein, 38 aa, synthetic construct
  source 1..38: note = TCF4.4
DDLGANDELISFKDEGEQEEAERDLADVRSSLVNESET

SEQ ID NO: 2122 - protein, 45 aa, synthetic construct
  source 1..45: note = TCF4.5
DDLGANDELISFRDEGEQEERSSENSSAERDLADVKSSLVNESET

SEQ ID NO: 2123 - protein, 38 aa, synthetic construct
  source 1..38: note = TCF4.6
DDLGANDELISFRDEGEQEEAERDLADVKSSLVNESET

SEQ ID NO: 2124 - protein, 45 aa, synthetic construct
  source 1..45: note = TCF4.7
DDLGANDELISFRDEGEQEERSSENSSAERDLADVRSSLVNESET

SEQ ID NO: 2125 - protein, 38 aa, synthetic construct
  source 1..38: note = TCF4.8
DDLGANDELISFRDEGEQEEAERDLADVRSSLVNESET

SEQ ID NO: 2126 - protein, 41 aa, synthetic construct
  source 1..41: note = TCF4.9
DDLGANDELISFKDEGEQEEKSSENSSAERDLADVKSSLVN

SEQ ID NO: 2127 - protein, 16 aa, synthetic construct
  source 1..16: note = con1.1
SAVLQKKITDYFHPKK

SEQ ID NO: 2128 - protein, 16 aa, synthetic construct
  source 1..16: note = con1.2
SAVLMKKRTDYRHPKK

SEQ ID NO: 2129 - protein, 15 aa, synthetic construct
  source 1..15: note = p21.1
GRRQTSMTDFYHSTR

SEQ ID NO: 2130 - protein, 22 aa, synthetic construct
  source 1..22: note = p21.2
GRGRRQTSMTDYFHSTRRLIFS

SEQ ID NO: 2131 - protein, 15 aa, synthetic construct
  source 1..15: note = p21.3
GRRQTSMTDYFHSTR

SEQ ID NO: 2132 - protein, 15 aa, synthetic construct
  source 1..15: note = p21.4
GRRQTSMTDYYHSTR

SEQ ID NO: 2133 - protein, 15 aa, synthetic construct
  source 1..15: note = p21.5
GRRDSKITDHFHSTR

SEQ ID NO: 2134 - protein, 15 aa, synthetic construct
  source 1..15: note = p21.6
GRRMKSIDTFFHSTR

SEQ ID NO: 2135 - protein, 15 aa, synthetic construct
  source 1..15: note = p21.7
GRRQTRITEYFHSTR

SEQ ID NO: 2136 - protein, 15 aa, synthetic construct
  source 1..15: note = p21.8
GRRQGRLDDFFHSTR

SEQ ID NO: 2137 - protein, 15 aa, synthetic construct
  source 1..15: note = p21.9
GRRDTSMTDFYHSTR

SEQ ID NO: 2138 - protein, 24 aa, synthetic construct
  source 1..24: note = 12xGS
GSGSGSGSGSGSGSGSGSGSGSGS

SEQ ID NO: 2139 - protein, 18 aa, synthetic construct
  source 1..18: note = 9xGS
GSGSGSGSGSGSGSGSGS

SEQ ID NO: 2140 - protein, 12 aa, synthetic construct
  source 1..12: note = 6xGS
GSGSGSGSGSGS

SEQ ID NO: 2141 - protein, 10 aa, synthetic construct
  source 1..10: note = 5xGS
GSGSGSGSGS

SEQ ID NO: 2142 - protein, 8 aa, synthetic construct
  source 1..8: note = 4xGS
GSGSGSGS

SEQ ID NO: 2143 - protein, 6 aa, synthetic construct
  source 1..6: note = 3xGS
GSGSGS

SEQ ID NO: 2144 - protein, 4 aa, synthetic construct
  source 1..4: note = 2xGS
GSGS

SEQ ID NO: 2145 - skipped

SEQ ID NO: 2146 - protein, 14 aa, synthetic construct
  source 1..14: note = 3xGGGS+GS
GGGSGGGSGGGSGS

SEQ ID NO: 2147 - protein, 12 aa, synthetic construct
  source 1..12: note = 3xGGGS
GGGSGGGSGGGS

SEQ ID NO: 2148 - protein, 8 aa, synthetic construct
  source 1..8: note = 2xGGGS
GGGSGGGS

SEQ ID NO: 2149 - protein, 4 aa, synthetic construct
  source 1..4: note = GGGS
GGGS

SEQ ID NO: 2150 - protein, 30 aa, synthetic construct
  source 1..30: note = L3H24L3
GSGMEELNRVKKDAEAITQAKNKEAEQGSG

SEQ ID NO: 2151 - protein, 29 aa, synthetic construct
  source 1..29: note = L2H24L3
SGMEELNRVKKDAEAITQAKNKEAEQGSG

SEQ ID NO: 2152 - protein, 28 aa, synthetic construct
  source 1..28: note = L1H24L3
GMEELNRVKKDAEAITQAKNKEAEQGSG

SEQ ID NO: 2153 - protein, 29 aa, synthetic construct
  source 1..29: note = L3H24L2
GSGMEELNRVKKDAEAITQAKNKEAEQGS

SEQ ID NO: 2154 - protein, 28 aa, synthetic construct
  source 1..28: note = L2H24L2
SGMEELNRVKKDAEAITQAKNKEAEQGS

SEQ ID NO: 2155 - protein, 27 aa, synthetic construct
  source 1..27: note = L1H24L2
GMEELNRVKKDAEAITQAKNKEAEQGS

SEQ ID NO: 2156 - protein, 28 aa, synthetic construct
  source 1..28: note = L3H24L1
GSGMEELNRVKKDAEAITQAKNKEAEQG

SEQ ID NO: 2157 - protein, 27 aa, synthetic construct
  source 1..27: note = L2H24L1
SGMEELNRVKKDAEAITQAKNKEAEQG

SEQ ID NO: 2158 - protein, 26 aa, synthetic construct
  source 1..26: note = L1H24L1
GMEELNRVKKDAEAITQAKNKEAEQG

SEQ ID NO: 2159 - protein, 22 aa, synthetic construct
  source 1..22: note = L3H16L3
GSGMEELNRVKKDAEAITQGSG

SEQ ID NO: 2160 - protein, 21 aa, synthetic construct
  source 1..21: note = L2H16L3
SGMEELNRVKKDAEAITQGSG

SEQ ID NO: 2161 - protein, 20 aa, synthetic construct
  source 1..20: note = L1H16L3
GMEELNRVKKDAEAITQGSG

SEQ ID NO: 2162 - protein, 21 aa, synthetic construct
  source 1..21: note = L3H16L2
GSGMEELNRVKKDAEAITQGS

SEQ ID NO: 2163 - protein, 20 aa, synthetic construct
  source 1..20: note = L2H16L2
SGMEELNRVKKDAEAITQGS

SEQ ID NO: 2164 - protein, 19 aa, synthetic construct
  source 1..19: note = L1H16L2
GMEELNRVKKDAEAITQGS

SEQ ID NO: 2165 - protein, 20 aa, synthetic construct
  source 1..20: note = L3H16L1
GSGMEELNRVKKDAEAITQG

SEQ ID NO: 2166 - protein, 19 aa, synthetic construct
  source 1..19: note = L2H16L1
SGMEELNRVKKDAEAITQG

SEQ ID NO: 2167 - protein, 18 aa, synthetic construct
  source 1..18: note = L1H16L1
GMEELNRVKKDAEAITQG

SEQ ID NO: 2168 - protein, 14 aa, synthetic construct
  source 1..14: note = L3H8L3
GSGMEELNRVKGSG

SEQ ID NO: 2169 - protein, 13 aa, synthetic construct
  source 1..13: note = L2H8L3
SGMEELNRVKGSG

SEQ ID NO: 2170 - protein, 12 aa, synthetic construct
  source 1..12: note = L1H8L3
GMEELNRVKGSG

SEQ ID NO: 2171 - protein, 13 aa, synthetic construct
  source 1..13: note = L3H8L2
GSGMEELNRVKGS

SEQ ID NO: 2172 - protein, 12 aa, synthetic construct
  source 1..12: note = L2H8L2
SGMEELNRVKGS

SEQ ID NO: 2173 - protein, 11 aa, synthetic construct
  source 1..11: note = L1H8L2
GMEELNRVKGS

SEQ ID NO: 2174 - protein, 12 aa, synthetic construct
  source 1..12: note = L3H8L1
GSGMEELNRVKG

SEQ ID NO: 2175 - protein, 11 aa, synthetic construct
  source 1..11: note = L2H8L1
SGMEELNRVKG

SEQ ID NO: 2176 - protein, 10 aa, synthetic construct
  source 1..10: note = L1H8L1
GMEELNRVKG

SEQ ID NO: 2177 - protein, 246 aa, synthetic construct; identical to SEQ ID NO: 726
  source 1..246: note = TCF4.1-(GS)1-CHIP.1-mycNLS-HA

SEQ ID NO: 2178 - protein, 248 aa, synthetic construct; identical to SEQ ID NO: 727
  source 1..248: note = TCF4.1-(GS)2-CHIP.1-mycNLS-HA

SEQ ID NO: 2179 - protein, 250 aa, synthetic construct; identical to SEQ ID NO: 728
  source 1..250: note = TCF4.1-(GS)3-CHIP.1-mycNLS-HA

SEQ ID NO: 2180 - protein, 252 aa, synthetic construct; identical to SEQ ID NO: 729
  source 1..252: note = TCF4.1-(GS)4-CHIP.1-mycNLS-HA

SEQ ID NO: 2181 - protein, 254 aa, synthetic construct; identical to SEQ ID NO: 730
  source 1..254: note = TCF4.1-(GS)5-CHIP.1-mycNLS-HA

SEQ ID NO: 2182 - protein, 256 aa, synthetic construct; identical to SEQ ID NO: 731
  source 1..256: note = TCF4.1-(GS)6-CHIP.1-mycNLS-HA

SEQ ID NO: 2183 - protein, 107 aa, synthetic construct; identical to SEQ ID NO: 738
  source 1..107: note = HA-mycNLS-DCAF1.1-(GS)1-TCF4.1

SEQ ID NO: 2184 - protein, 109 aa, synthetic construct; identical to SEQ ID NO: 739
  source 1..109: note = HA-mycNLS-DCAF1.1-(GS)2-TCF4.1

SEQ ID NO: 2185 - protein, 111 aa, synthetic construct; identical to SEQ ID NO: 740
  source 1..111: note = HA-mycNLS-DCAF1.1-(GS)3-TCF4.1

SEQ ID NO: 2186 - protein, 113 aa, synthetic construct; identical to SEQ ID NO: 741
  source 1..113: note = HA-mycNLS-DCAF1.1-(GS)4-TCF4.1

SEQ ID NO: 2187 - protein, 115 aa, synthetic construct; identical to SEQ ID NO: 742
  source 1..115: note = HA-mycNLS-DCAF1.1-(GS)5-TCF4.1

SEQ ID NO: 2188 - protein, 117 aa, synthetic construct; identical to SEQ ID NO: 743
  source 1..117: note = HA-mycNLS-DCAF1.1-(GS)6-TCF4.1

SEQ ID NO: 2189 - protein, 428 aa, synthetic construct; identical to SEQ ID NO: 750
  source 1..428: note = HA-mycNLS-TCF4.1-(GS)1-E6AP.1

SEQ ID NO: 2190 - protein, 430 aa, synthetic construct; identical to SEQ ID NO: 751
  source 1..430: note = HA-mycNLS-TCF4.1-(GS)2-E6AP.1

SEQ ID NO: 2191 - protein, 432 aa, synthetic construct; identical to SEQ ID NO: 752
  source 1..432: note = HA-mycNLS-TCF4.1(GS)3-E6AP.1

SEQ ID NO: 2192 - protein, 434 aa, synthetic construct; identical to SEQ ID NO: 753
  source 1..434: note = HA-mycNLS-TCF4.1-(GS)4-E6AP.1

SEQ ID NO: 2193 - protein, 436 aa, synthetic construct; identical to SEQ ID NO: 754
  source 1..436: note = HA-mycNLS-TCF4.1-(GS)5-E6AP.1

SEQ ID NO: 2194 - protein, 438 aa, synthetic construct; identical to SEQ ID NO: 755
  source 1..438: note = HA-mycNLS-TCF4.1-(GS)6-E6AP.1

SEQ ID NO: 2195 - protein, 424 aa, synthetic construct; identical to SEQ ID NO: 762
  source 1..424: note = HA-FBXW7a.1-(GS)1-TCF4.1

SEQ ID NO: 2196 - protein, 426 aa, synthetic construct; identical to SEQ ID NO: 763
  source 1..426: note = HA-FBXW7a.1-(GS)2-TCF4.1

SEQ ID NO: 2197 - protein, 428 aa, synthetic construct; identical to SEQ ID NO: 764
  source 1..428: note = HA-FBXW7a.1-(GS)3-TCF4.1

SEQ ID NO: 2198 - protein, 430 aa, synthetic construct; identical to SEQ ID NO: 765
  source 1..430: note = HA-FBXW7a.1-(GS)4-TCF4.1

SEQ ID NO: 2199 - protein, 432 aa, synthetic construct; identical to SEQ ID NO: 766
  source 1..432: note = HA-FBXW7a.1-(GS)5-TCF4.1

SEQ ID NO: 2200 - protein, 434 aa, synthetic construct; identical to SEQ ID NO: 767
  source 1..434: note = HA-FBXW7a.1-(GS)6-TCF4.1

SEQ ID NO: 2201 - protein, 393 aa, synthetic construct; identical to SEQ ID NO: 774
  source 1..393: note = HA-mycNLS-Keap1.1-(GS)1-TCF4.1

SEQ ID NO: 2202 - protein, 395 aa, synthetic construct; identical to SEQ ID NO: 775
  source 1..395: note = HA-mycNLS-Keap1.1-(GS)2-TCF4.1

SEQ ID NO: 2203 - protein, 397 aa, synthetic construct; identical to SEQ ID NO: 776
  source 1..397: note = HA-mycNLS-Keap1.1-(GS)3-TCF4.1

SEQ ID NO: 2204 - protein, 399 aa, synthetic construct; identical to SEQ ID NO: 777
  source 1..399: note = HA-mycNLS-Keap1.1-(GS)4-TCF4.1

SEQ ID NO: 2205 - protein, 401 aa, synthetic construct; identical to SEQ ID NO: 778
  source 1..401: note = HA-mycNLS-Keap1.1-(GS)5-TCF4.1

SEQ ID NO: 2206 - protein, 403 aa, synthetic construct; identical to SEQ ID NO: 779
  source 1..403: note = HA-mycNLS-Keap1.1-(GS)6-TCF4.1

SEQ ID NO: 2207 - protein, 199 aa, synthetic construct; identical to SEQ ID NO: 786
  source 1..199: note = HA-mycNLS-RNF125.1-(GS)1-TCF4.1

SEQ ID NO: 2208 - protein, 201 aa, synthetic construct; identical to SEQ ID NO: 787
  source 1..201: note = HA-mycNLS-RNF125.1-(GS)2-TCF4.1

SEQ ID NO: 2209 - protein, 203 aa, synthetic construct; identical to SEQ ID NO: 788
  source 1..203: note = HA-mycNLS-RNF125.1-(GS)3-TCF4.1

SEQ ID NO: 2210 - protein, 205 aa, synthetic construct; identical to SEQ ID NO: 789
  source 1..205: note = HA-mycNLS-RNF125.1-(GS)4-TCF4.1

SEQ ID NO: 2211 - protein, 207 aa, synthetic construct; identical to SEQ ID NO: 790
  source 1..207: note = HA-mycNLS-RNF125.1-(GS)5-TCF4.1

SEQ ID NO: 2212 - protein, 209 aa, synthetic construct; identical to SEQ ID NO: 791
  source 1..209: note = HA-mycNLS-RNF125.1-(GS)6-TCF4.1

SEQ ID NO: 2213 - protein, 298 aa, synthetic construct; identical to SEQ ID NO: 798
  source 1..298: note = TCF4.1-(GS)1-SPOP.1-mycNLS-HA

SEQ ID NO: 2214 - protein, 300 aa, synthetic construct; identical to SEQ ID NO: 799
  source 1..300: note = TCF4.1-(GS)2-SPOP.1-mycNLS-HA

SEQ ID NO: 2215 - protein, 302 aa, synthetic construct; identical to SEQ ID NO: 800
  source 1..302: note = TCF4.1-(GS)3-SPOP.1-mycNLS-HA

SEQ ID NO: 2216 - protein, 304 aa, synthetic construct; identical to SEQ ID NO: 801
  source 1..304: note = TCF4.1-(GS)4-SPOP.1-mycNLS-HA

SEQ ID NO: 2217 - protein, 307 aa, synthetic construct; identical to SEQ ID NO: 802
  source 1..307: note = TCF4.1-(GS)5-SPOP.1-mycNLS-HA

SEQ ID NO: 2218 - protein, 308 aa, synthetic construct; identical to SEQ ID NO: 803
  source 1..308: note = TCF4.1-(GS)6-SPOP.1-mycNLS-HA

SEQ ID NO: 2219 - protein, 112 aa, synthetic construct
  source 1..112: note = TCF4.1-(GS)1-VIF.1-mycNLS-HA
MDDLGANDELISFKDEGEQEEKSSENSSAERDLADVKSSLVNESETGSSESAIRNTILGRIVSPRCEYQAGHNKVGSLQYLALAALIKPKGSGSPAAKRVKLDYPYDVPDYA

SEQ ID NO: 2220 - protein, 114 aa, synthetic construct
  source 1..114: note = TCF4.1-(GS)2-VIF.1-mycNLS-HA
MDDLGANDELISFKDEGEQEEKSSENSSAERDLADVKSSLVNESETGSGSSESAIRNTILGRIVSPRCEYQAGHNKVGSLQYLALAALIKPKGSGSPAAKRVKLDYPYDVPDYA

SEQ ID NO: 2221 - protein, 116 aa, synthetic construct
  source 1..116: note = TCF4.1-(GS)3-VIF.1-mycNLS-HA
MDDLGANDELISFKDEGEQEEKSSENSSAERDLADVKSSLVNESETGSGSGSSESAIRNTILGRIVSPRCEYQAGHNKVGSLQYLALAALIKPKGSGSPAAKRVKLDYPYDVPDYA

SEQ ID NO: 2222 - protein, 118 aa, synthetic construct
  source 1..118: note = TCF4.1-(GS)4-VIF.1-mycNLS-HA
MDDLGANDELISFKDEGEQEEKSSENSSAERDLADVKSSLVNESETGSGSGSGSSESAIRNTILGRIVSPRCEYQAGHNKVGSLQYLALAALIKPKGSGSPAAKRVKLDYPYDVPDYA

SEQ ID NO: 2223 - protein, 120 aa, synthetic construct
  source 1..120: note = TCF4.1-(GS)5-VIF.1-mycNLS-HA
MDDLGANDELISFKDEGEQEEKSSENSSAERDLADVKSSLVNESETGSGSGSGSGSSESAIRNTILGRIVSPRCEYQAGHNKVGSLQYLALAALIKPKGSGSPAAKRVKLDYPYDVPDYA

SEQ ID NO: 2224 - protein, 122 aa, synthetic construct
  source 1..122: note = TCF4.1-(GS)6-VIF.1-mycNLS-HA
MDDLGANDELISFKDEGEQEEKSSENSSAERDLADVKSSLVNESETGSGSGSGSGSGSSESAIRNTILGRIVSPRCEYQAGHNKVGSLQYLALAALIKPKGSGSPAAKRVKLDYPYDVPDYA

SEQ ID NO: 2225 - protein, 237 aa, synthetic construct; identical to SEQ ID NO: 944
  source 1..237: note = TCF4.1-(GS)1-CHIP.1-HA

SEQ ID NO: 2226 - protein, 239 aa, synthetic construct; identical to SEQ ID NO: 945
  source 1..239: note = TCF4.1-(GS)2-CHIP.1-HA

SEQ ID NO: 2227 - protein, 241 aa, synthetic construct; identical to SEQ ID NO: 946
  source 1..241: note = TCF4.1-(GS)3-CHIP.1-HA

SEQ ID NO: 2228 - protein, 243 aa, synthetic construct; identical to SEQ ID NO: 947
  source 1..243: note = TCF4.1-(GS)4-CHIP.1-HA

SEQ ID NO: 2229 - protein, 245 aa, synthetic construct; identical to SEQ ID NO: 948
  source 1..245: note = TCF4.1-(GS)5-CHIP.1-HA

SEQ ID NO: 2230 - protein, 247 aa, synthetic construct; identical to SEQ ID NO: 949
  source 1..247: note = TCF4.1-(GS)6-CHIP.1-HA

SEQ ID NO: 2231 - protein, 98 aa, synthetic construct; identical to SEQ ID NO: 956
  source 1..98: note = HA-DCAF1.1-(GS)1-TCF4.1

SEQ ID NO: 2232 - protein, 100 aa, synthetic construct; identical to SEQ ID NO: 957
  source 1..100: note = HA-DCAF1.1-(GS)2-TCF4.1

SEQ ID NO: 2233 - protein, 102 aa, synthetic construct; identical to SEQ ID NO: 958
  source 1..102: note = HA-DCAF1.1-(GS)3-TCF4.1

SEQ ID NO: 2234 - protein, 104 aa, synthetic construct; identical to SEQ ID NO: 959
  source 1..104: note = HA-DCAF1.1-(GS)4-TCF4.1

SEQ ID NO: 2235 - protein, 106 aa, synthetic construct; identical to SEQ ID NO: 960
  source 1..106: note = HA-DCAF1.1-(GS)5-TCF4.1

SEQ ID NO: 2236 - protein, 108 aa, synthetic construct; identical to SEQ ID NO: 961
  source 1..108: note = HA-DCAF1.1-(GS)6-TCF4.1

SEQ ID NO: 2237 - protein, 419 aa, synthetic construct; identical to SEQ ID NO: 968
  source 1..419: note = HA-TCF4.1-(GS)1-E6AP.1

SEQ ID NO: 2238 - protein, 421 aa, synthetic construct; identical to SEQ ID NO: 969
  source 1..421: note = HA-TCF4.1-(GS)2-E6AP.1

SEQ ID NO: 2239 - protein, 423 aa, synthetic construct; identical to SEQ ID NO: 970
  source 1..423: note = HA-TCF4.1-(GS)3-E6AP.1

SEQ ID NO: 2240 - protein, 425 aa, synthetic construct; identical to SEQ ID NO: 971
  source 1..425: note = HA-TCF4.1-(GS)4-E6AP.1

SEQ ID NO: 2241 - protein, 427 aa, synthetic construct; identical to SEQ ID NO: 972
  source 1..427: note = HA-TCF4.1-(GS)5-E6AP.1

SEQ ID NO: 2242 - protein, 429 aa, synthetic construct; identical to SEQ ID NO: 973
  source 1..429: note = HA-TCF4.1-(GS)6-E6AP.1

SEQ ID NO: 2243 - protein, 343 aa, synthetic construct; identical to SEQ ID NO: 980
  source 1..343: note = HA-bTRCP.1-(GS)1-TCF4.1

SEQ ID NO: 2244 - protein, 345 aa, synthetic construct; identical to SEQ ID NO: 981
  source 1..345: note = HA--bTRCP.1-(GS)2-TCF4.1

SEQ ID NO: 2245 - protein, 347 aa, synthetic construct; identical to SEQ ID NO: 982
  source 1..347: note = HA--bTRCP.1-(GS)3-TCF4.1

SEQ ID NO: 2246 - protein, 349 aa, synthetic construct; identical to SEQ ID NO: 983
  source 1..349: note = HA--bTRCP.1-(GS)4-TCF4.1

SEQ ID NO: 2247 - protein, 351 aa, synthetic construct; identical to SEQ ID NO: 984
  source 1..351: note = HA--bTRCP.1-(GS)5-TCF4.1

SEQ ID NO: 2248 - protein, 353 aa, synthetic construct; identical to SEQ ID NO: 985
  source 1..353: note = HA--bTRCP.1-(GS)6-TCF4.1

SEQ ID NO: 2249 - protein, 384 aa, synthetic construct; identical to SEQ ID NO: 992
  source 1..384: note = HA-Keap1.1-(GS)1-TCF4.1

SEQ ID NO: 2250 - protein, 386 aa, synthetic construct; identical to SEQ ID NO: 993
  source 1..386: note = HA-Keap1.1-(GS)2-TCF4.1

SEQ ID NO: 2251 - protein, 388 aa, synthetic construct; identical to SEQ ID NO: 994
  source 1..388: note = HA-Keap1.1-(GS)3-TCF4.1

SEQ ID NO: 2252 - protein, 390 aa, synthetic construct; identical to SEQ ID NO: 995
  source 1..390: note = HA-Keap1.1-(GS)4-TCF4.1

SEQ ID NO: 2253 - protein, 392 aa, synthetic construct; identical to SEQ ID NO: 996
  source 1..392: note = HA-Keap1.1-(GS)5-TCF4.1

SEQ ID NO: 2254 - protein, 394 aa, synthetic construct; identical to SEQ ID NO: 997
  source 1..394: note = HA-Keap1.1-(GS)6-TCF4.1

SEQ ID NO: 2255 - protein, 190 aa, synthetic construct; identical to SEQ ID NO: 1004
  source 1..190: note = HA-RNF125.1-(GS)1-TCF4.1

SEQ ID NO: 2256 - protein, 192 aa, synthetic construct; identical to SEQ ID NO: 1005
  source 1..192: note = HA-RNF125.1-(GS)2-TCF4.1

SEQ ID NO: 2257 - protein, 194 aa, synthetic construct; identical to SEQ ID NO: 1006
  source 1..194: note = HA-RNF125.1-(GS)3-TCF4.1

SEQ ID NO: 2258 - protein, 196 aa, synthetic construct; identical to SEQ ID NO: 1007
  source 1..196: note = HA-RNF125.1-(GS)4-TCF4.1

SEQ ID NO: 2259 - protein, 198 aa, synthetic construct; identical to SEQ ID NO: 1008
  source 1..198: note = HA-RNF125.1-(GS)5-TCF4.1

SEQ ID NO: 2260 - protein, 200 aa, synthetic construct; identical to SEQ ID NO: 1009
  source 1..200: note = HA-RNF125.1-(GS)6-TCF4.1

SEQ ID NO: 2261 - protein, 103 aa, synthetic construct
  source 1..103: note = TCF4.1-(GS)1-VIF.1-HA
MDDLGANDELISFKDEGEQEEKSSENSSAERDLADVKSSLVNESETGSSESAIRNTILGRIVSPRCEYQAGHNKVGSLQYLALAALIKPKGSGSYPYDVPDYA

SEQ ID NO: 2262 - protein, 105 aa, synthetic construct
  source 1..105: note = TCF4.1-(GS)2-VIF.1-HA
MDDLGANDELISFKDEGEQEEKSSENSSAERDLADVKSSLVNESETGSGSSESAIRNTILGRIVSPRCEYQAGHNKVGSLQYLALAALIKPKGSGSYPYDVPDYA

SEQ ID NO: 2263 - protein, 107 aa, synthetic construct
  source 1..107: note = TCF4.1-(GS)3-VIF.1-HA
MDDLGANDELISFKDEGEQEEKSSENSSAERDLADVKSSLVNESETGSGSGSSESAIRNTILGRIVSPRCEYQAGHNKVGSLQYLALAALIKPKGSGSYPYDVPDYA

SEQ ID NO: 2264 - protein, 109 aa, synthetic construct
  source 1..109: note = TCF4.1-(GS)4-VIF.1-HA
MDDLGANDELISFKDEGEQEEKSSENSSAERDLADVKSSLVNESETGSGSGSGSSESAIRNTILGRIVSPRCEYQAGHNKVGSLQYLALAALIKPKGSGSYPYDVPDYA

SEQ ID NO: 2265 - protein, 111 aa, synthetic construct
  source 1..111: note = TCF4.1-(GS)5-VIF.1-HA
MDDLGANDELISFKDEGEQEEKSSENSSAERDLADVKSSLVNESETGSGSGSGSGSSESAIRNTILGRIVSPRCEYQAGHNKVGSLQYLALAALIKPKGSGSYPYDVPDYA

SEQ ID NO: 2266 - protein, 113 aa, synthetic construct
  source 1..113: note = TCF4.1-(GS)6-VIF.1-HA
MDDLGANDELISFKDEGEQEEKSSENSSAERDLADVKSSLVNESETGSGSGSGSGSGSSESAIRNTILGRIVSPRCEYQAGHNKVGSLQYLALAALIKPKGSGSYPYDVPDYA

SEQ ID NO: 2267 - protein, 172 aa, synthetic construct
  source 1..172: note = HA-mycNLS-TCF4.1-(GS)3-RNF125.2
MYPYDVPDYAPAAKRVKLDGSGSGSDDLGANDELISFKDEGEQEEKSSENSSAERDLADVKSSLVNESETGSGSGSTSFDCAVCLEVLHQPVRTRCGHVFCRSCIATSLKNNKWTCPYCRAYLPSEGVPATDVAKRMKSEYKNCAECDTLVCLSEMRAHIRTCQKYIDKYGP

SEQ ID NO: 2268 - protein, 172 aa, synthetic construct
  source 1..172: note = RNF125.2-(GS)3-TCF4.1-mycNLS-HA
MTSFDCAVCLEVLHQPVRTRCGHVFCRSCIATSLKNNKWTCPYCRAYLPSEGVPATDVAKRMKSEYKNCAECDTLVCLSEMRAHIRTCQKYIDKYGPGSGSGSDDLGANDELISFKDEGEQEEKSSENSSAERDLADVKSSLVNESETGSGSGSPAAKRVKLDYPYDVPDYA

SEQ ID NO: 2269 - protein, 171 aa, synthetic construct; identical to SEQ ID NO: 812
  source 1..171: note = HA-mycNLS-TCF4.1-(GS)3-RNF114.1

SEQ ID NO: 2270 - protein, 171 aa, synthetic construct; identical to SEQ ID NO: 824
  source 1..171: note = RNF114.1-(GS)3-TCF4.1-mycNLS-HA

SEQ ID NO: 2271 - protein, 176 aa, synthetic construct; identical to SEQ ID NO: 836
  source 1..176: note = HA-mycNLS-TCF4.1-(GS)3-RNF138.1

SEQ ID NO: 2272 - protein, 176 aa, synthetic construct; identical to SEQ ID NO: 848
  source 1..176: note = RNF138.1-(GS)3-TCF4.1-mycNLS-HA

SEQ ID NO: 2273 - protein, 177 aa, synthetic construct; identical to SEQ ID NO: 860
  source 1..177: note = HA-mycNLS-TCF4.1-(GS)3-RNF166.1

SEQ ID NO: 2274 - protein, 177 aa, synthetic construct; identical to SEQ ID NO: 872
  source 1..177: note = RNF166.1-(GS)3-TCF4.1-mycNLS-HA

SEQ ID NO: 2275 - protein, 151 aa, synthetic construct; identical to SEQ ID NO: 882
  source 1..151: note = HA-mycNLS-TCF4.1-(GS)1-CBLb.1

SEQ ID NO: 2276 - protein, 153 aa, synthetic construct; identical to SEQ ID NO: 883
  source 1..153: note = HA-mycNLS-TCF4.1-(GS)2-CBLb.1

SEQ ID NO: 2277 - protein, 155 aa, synthetic construct; identical to SEQ ID NO: 884
  source 1..155: note = HA-mycNLS-TCF4.1-(GS)3-CBLb.1

SEQ ID NO: 2278 - protein, 157 aa, synthetic construct; identical to SEQ ID NO: 885
  source 1..157: note = HA-mycNLS-TCF4.1-(GS)4-CBLb.1

SEQ ID NO: 2279 - protein, 159 aa, synthetic construct; identical to SEQ ID NO: 886
  source 1..159: note = HA-mycNLS-TCF4.1-(GS)5-CBLb.1

SEQ ID NO: 2280 - protein, 161 aa, synthetic construct; identical to SEQ ID NO: 887
  source 1..161: note = HA-mycNLS-TCF4.1-(GS)6-CBLb.1

SEQ ID NO: 2281 - protein, 151 aa, synthetic construct; identical to SEQ ID NO: 894
  source 1..151: note = CBLb.1-(GS)1-TCF4.1-mycNLS-HA

SEQ ID NO: 2282 - protein, 153 aa, synthetic construct; identical to SEQ ID NO: 895
  source 1..153: note = CBLb.1-(GS)2-TCF4.1-mycNLS-HA

SEQ ID NO: 2283 - protein, 155 aa, synthetic construct; identical to SEQ ID NO: 896
  source 1..155: note = CBLb.1-(GS)3-TCF4.1-mycNLS-HA

SEQ ID NO: 2284 - protein, 157 aa, synthetic construct; identical to SEQ ID NO: 897
  source 1..157: note = CBLb.1-(GS)4-TCF4.1-mycNLS-HA

SEQ ID NO: 2285 - protein, 159 aa, synthetic construct; identical to SEQ ID NO: 898
  source 1..159: note = CBLb.1-(GS)5-TCF4.1-mycNLS-HA

SEQ ID NO: 2286 - protein, 161 aa, synthetic construct; identical to SEQ ID NO: 899
  source 1..161: note = CBLb.1-(GS)6-TCF4.1-mycNLS-HA

SEQ ID NO: 2287 - protein, 164 aa, synthetic construct; identical to SEQ ID NO: 906
  source 1..164: note = HA-mycNLS-TCF4.1-(GS)1-NHLRC1.1

SEQ ID NO: 2288 - protein, 166 aa, synthetic construct; identical to SEQ ID NO: 907
  source 1..166: note = HA-mycNLS-TCF4.1-(GS)2-NHLRC1.1

SEQ ID NO: 2289 - protein, 168 aa, synthetic construct; identical to SEQ ID NO: 908
  source 1..168: note = HA-mycNLS-TCF4.1-(GS)3-NHLRC1.1

SEQ ID NO: 2290 - protein, 170 aa, synthetic construct; identical to SEQ ID NO: 909
  source 1..170: note = HA-mycNLS-TCF4.1-(GS)4-NHLRC1.1

SEQ ID NO: 2291 - protein, 172 aa, synthetic construct; identical to SEQ ID NO: 910
  source 1..172: note = HA-mycNLS-TCF4.1-(GS)5-NHLRC1.1

SEQ ID NO: 2292 - protein, 174 aa, synthetic construct; identical to SEQ ID NO: 911
  source 1..174: note = HA-mycNLS-TCF4.1-(GS)6-NHLRC1.1

SEQ ID NO: 2293 - protein, 164 aa, synthetic construct; identical to SEQ ID NO: 918
  source 1..164: note = NHLRC1.1-(GS)1-TCF4.1-mycNLS-HA

SEQ ID NO: 2294 - protein, 166 aa, synthetic construct; identical to SEQ ID NO: 919
  source 1..166: note = NHLRC1.1-(GS)2-TCF4.1-mycNLS-HA

SEQ ID NO: 2295 - protein, 168 aa, synthetic construct; identical to SEQ ID NO: 920
  source 1..168: note = NHLRC1.1-(GS)3-TCF4.1-mycNLS-HA

SEQ ID NO: 2296 - protein, 170 aa, synthetic construct; identical to SEQ ID NO: 921
  source 1..170: note = NHLRC1.1-(GS)4-TCF4.1-mycNLS-HA

SEQ ID NO: 2297 - protein, 172 aa, synthetic construct; identical to SEQ ID NO: 922
  source 1..172: note = NHLRC1.1-(GS)5-TCF4.1-mycNLS-HA

SEQ ID NO: 2298 - protein, 174 aa, synthetic construct; identical to SEQ ID NO: 923
  source 1..174: note = NHLRC1.1-(GS)6-TCF4.1-mycNLS-HA

SEQ ID NO: 2299 - protein, 346 aa, synthetic construct; identical to SEQ ID NO: 931
  source 1..346: note = TRIM21.1-TCF4.1-mycNLS-HA

SEQ ID NO: 2300 - protein, 350 aa, synthetic construct; identical to SEQ ID NO: 933
  source 1..350: note = TRIM21.1-(GS)2-TCF4.1-mycNLS-HA

SEQ ID NO: 2301 - protein, 354 aa, synthetic construct; identical to SEQ ID NO: 935
  source 1..354: note = TRIM21.1-(GS)4-TCF4.1-mycNLS-HA

SEQ ID NO: 2302 - protein, 207 aa, synthetic construct
  source 1..207: note = RNF125.1-L1H8L1-TCF4.1-mycNLS-HA
MGSVLSTDSGKSAPASATARALERRRDPELPVTSFDCAVCLEVLHQPVRTRCGHVFCRSCIATSLKNNKWTCPYCRAYLPSEGVPATDVAKRMKSEYKNCAECDTLVCLSEMRAHIRTCQKYIDKYGPGMEELNRVKGDDLGANDELISFKDEGEQEEKSSENSSAERDLADVKSSLVNESETGSGSGSPAAKRVKLDYPYDVPDYA

SEQ ID NO: 2303 - protein, 208 aa, synthetic construct
  source 1..208: note = RNF125.1-L2H8L1-TCF4.1-mycNLS-HA
MGSVLSTDSGKSAPASATARALERRRDPELPVTSFDCAVCLEVLHQPVRTRCGHVFCRSCIATSLKNNKWTCPYCRAYLPSEGVPATDVAKRMKSEYKNCAECDTLVCLSEMRAHIRTCQKYIDKYGPSGMEELNRVKGDDLGANDELISFKDEGEQEEKSSENSSAERDLADVKSSLVNESETGSGSGSPAAKRVKLDYPYDVPDYA

SEQ ID NO: 2304 - protein, 209 aa, synthetic construct
  source 1..209: note = RNF125.1-L3H8L1-TCF4.1-mycNLS-HA
MGSVLSTDSGKSAPASATARALERRRDPELPVTSFDCAVCLEVLHQPVRTRCGHVFCRSCIATSLKNNKWTCPYCRAYLPSEGVPATDVAKRMKSEYKNCAECDTLVCLSEMRAHIRTCQKYIDKYGPGSGMEELNRVKGDDLGANDELISFKDEGEQEEKSSENSSAERDLADVKSSLVNESETGSGSGSPAAKRVKLDYPYDVPDYA

SEQ ID NO: 2305 - protein, 208 aa, synthetic construct
  source 1..208: note = RNF125.1-L1H8L2-TCF4.1-mycNLS-HA
MGSVLSTDSGKSAPASATARALERRRDPELPVTSFDCAVCLEVLHQPVRTRCGHVFCRSCIATSLKNNKWTCPYCRAYLPSEGVPATDVAKRMKSEYKNCAECDTLVCLSEMRAHIRTCQKYIDKYGPGMEELNRVKGSDDLGANDELISFKDEGEQEEKSSENSSAERDLADVKSSLVNESETGSGSGSPAAKRVKLDYPYDVPDYA

SEQ ID NO: 2306 - protein, 209 aa, synthetic construct
  source 1..209: note = RNF125.1-L2H8L2-TCF4.1-mycNLS-HA
MGSVLSTDSGKSAPASATARALERRRDPELPVTSFDCAVCLEVLHQPVRTRCGHVFCRSCIATSLKNNKWTCPYCRAYLPSEGVPATDVAKRMKSEYKNCAECDTLVCLSEMRAHIRTCQKYIDKYGPSGMEELNRVKGSDDLGANDELISFKDEGEQEEKSSENSSAERDLADVKSSLVNESETGSGSGSPAAKRVKLDYPYDVPDYA

SEQ ID NO: 2307 - protein, 210 aa, synthetic construct
  source 1..210: note = RNF125.1-L3H8L2-TCF4.1-mycNLS-HA
MGSVLSTDSGKSAPASATARALERRRDPELPVTSFDCAVCLEVLHQPVRTRCGHVFCRSCIATSLKNNKWTCPYCRAYLPSEGVPATDVAKRMKSEYKNCAECDTLVCLSEMRAHIRTCQKYIDKYGPGSGMEELNRVKGSDDLGANDELISFKDEGEQEEKSSENSSAERDLADVKSSLVNESETGSGSGSPAAKRVKLDYPYDVPDYA

SEQ ID NO: 2308 - protein, 209 aa, synthetic construct
  source 1..209: note = RNF125.1-L1H8L3-TCF4.1-mycNLS-HA
MGSVLSTDSGKSAPASATARALERRRDPELPVTSFDCAVCLEVLHQPVRTRCGHVFCRSCIATSLKNNKWTCPYCRAYLPSEGVPATDVAKRMKSEYKNCAECDTLVCLSEMRAHIRTCQKYIDKYGPGMEELNRVKGSGDDLGANDELISFKDEGEQEEKSSENSSAERDLADVKSSLVNESETGSGSGSPAAKRVKLDYPYDVPDYA

SEQ ID NO: 2309 - protein, 210 aa, synthetic construct
  source 1..210: note = RNF125.1-L2H8L3-TCF4.1-mycNLS-HA
MGSVLSTDSGKSAPASATARALERRRDPELPVTSFDCAVCLEVLHQPVRTRCGHVFCRSCIATSLKNNKWTCPYCRAYLPSEGVPATDVAKRMKSEYKNCAECDTLVCLSEMRAHIRTCQKYIDKYGPSGMEELNRVKGSGDDLGANDELISFKDEGEQEEKSSENSSAERDLADVKSSLVNESETGSGSGSPAAKRVKLDYPYDVPDYA

SEQ ID NO: 2310 - protein, 211 aa, synthetic construct
  source 1..211: note = RNF125.1-L3H8L3-TCF4.1-mycNLS-HA
MGSVLSTDSGKSAPASATARALERRRDPELPVTSFDCAVCLEVLHQPVRTRCGHVFCRSCIATSLKNNKWTCPYCRAYLPSEGVPATDVAKRMKSEYKNCAECDTLVCLSEMRAHIRTCQKYIDKYGPGSGMEELNRVKGSGDDLGANDELISFKDEGEQEEKSSENSSAERDLADVKSSLVNESETGSGSGSPAAKRVKLDYPYDVPDYA

SEQ ID NO: 2311 - protein, 215 aa, synthetic construct
  source 1..215: note = RNF125.1-L1H16L1-TCF4.1-mycNLS-HA
MGSVLSTDSGKSAPASATARALERRRDPELPVTSFDCAVCLEVLHQPVRTRCGHVFCRSCIATSLKNNKWTCPYCRAYLPSEGVPATDVAKRMKSEYKNCAECDTLVCLSEMRAHIRTCQKYIDKYGPGMEELNRVKKDAEAITQGDDLGANDELISFKDEGEQEEKSSENSSAERDLADVKSSLVNESETGSGSGSPAAKRVKLDYPYDVPDYA

SEQ ID NO: 2312 - protein, 216 aa, synthetic construct
  source 1..216: note = RNF125.1-L2H16L1-TCF4.1-mycNLS-HA
MGSVLSTDSGKSAPASATARALERRRDPELPVTSFDCAVCLEVLHQPVRTRCGHVFCRSCIATSLKNNKWTCPYCRAYLPSEGVPATDVAKRMKSEYKNCAECDTLVCLSEMRAHIRTCQKYIDKYGPSGMEELNRVKKDAEAITQGDDLGANDELISFKDEGEQEEKSSENSSAERDLADVKSSLVNESETGSGSGSPAAKRVKLDYPYDVPDYA

SEQ ID NO: 2313 - protein, 217 aa, synthetic construct
  source 1..217: note = RNF125.1-L3H16L1-TCF4.1-mycNLS-HA
MGSVLSTDSGKSAPASATARALERRRDPELPVTSFDCAVCLEVLHQPVRTRCGHVFCRSCIATSLKNNKWTCPYCRAYLPSEGVPATDVAKRMKSEYKNCAECDTLVCLSEMRAHIRTCQKYIDKYGPGSGMEELNRVKKDAEAITQGDDLGANDELISFKDEGEQEEKSSENSSAERDLADVKSSLVNESETGSGSGSPAAKRVKLDYPYDVPDYA

SEQ ID NO: 2314 - protein, 216 aa, synthetic construct
  source 1..216: note = RNF125.1-L1H16L2-TCF4.1-mycNLS-HA
MGSVLSTDSGKSAPASATARALERRRDPELPVTSFDCAVCLEVLHQPVRTRCGHVFCRSCIATSLKNNKWTCPYCRAYLPSEGVPATDVAKRMKSEYKNCAECDTLVCLSEMRAHIRTCQKYIDKYGPGMEELNRVKKDAEAITQGSDDLGANDELISFKDEGEQEEKSSENSSAERDLADVKSSLVNESETGSGSGSPAAKRVKLDYPYDVPDYA

SEQ ID NO: 2315 - protein, 217 aa, synthetic construct
  source 1..217: note = RNF125.1-L2H16L2-TCF4.1-mycNLS-HA
MGSVLSTDSGKSAPASATARALERRRDPELPVTSFDCAVCLEVLHQPVRTRCGHVFCRSCIATSLKNNKWTCPYCRAYLPSEGVPATDVAKRMKSEYKNCAECDTLVCLSEMRAHIRTCQKYIDKYGPSGMEELNRVKKDAEAITQGSDDLGANDELISFKDEGEQEEKSSENSSAERDLADVKSSLVNESETGSGSGSPAAKRVKLDYPYDVPDYA

SEQ ID NO: 2316 - protein, 218 aa, synthetic construct
  source 1..218: note = RNF125.1-L3H16L2-TCF4.1-mycNLS-HA
MGSVLSTDSGKSAPASATARALERRRDPELPVTSFDCAVCLEVLHQPVRTRCGHVFCRSCIATSLKNNKWTCPYCRAYLPSEGVPATDVAKRMKSEYKNCAECDTLVCLSEMRAHIRTCQKYIDKYGPGSGMEELNRVKKDAEAITQGSDDLGANDELISFKDEGEQEEKSSENSSAERDLADVKSSLVNESETGSGSGSPAAKRVKLDYPYDVPDYA

SEQ ID NO: 2317 - protein, 217 aa, synthetic construct
  source 1..217: note = RNF125.1-L1H16L3-TCF4.1-mycNLS-HA
MGSVLSTDSGKSAPASATARALERRRDPELPVTSFDCAVCLEVLHQPVRTRCGHVFCRSCIATSLKNNKWTCPYCRAYLPSEGVPATDVAKRMKSEYKNCAECDTLVCLSEMRAHIRTCQKYIDKYGPGMEELNRVKKDAEAITQGSGDDLGANDELISFKDEGEQEEKSSENSSAERDLADVKSSLVNESETGSGSGSPAAKRVKLDYPYDVPDYA

SEQ ID NO: 2318 - protein, 218 aa, synthetic construct
  source 1..218: note = RNF125.1-L2H16L3-TCF4.1-mycNLS-HA
MGSVLSTDSGKSAPASATARALERRRDPELPVTSFDCAVCLEVLHQPVRTRCGHVFCRSCIATSLKNNKWTCPYCRAYLPSEGVPATDVAKRMKSEYKNCAECDTLVCLSEMRAHIRTCQKYIDKYGPSGMEELNRVKKDAEAITQGSGDDLGANDELISFKDEGEQEEKSSENSSAERDLADVKSSLVNESETGSGSGSPAAKRVKLDYPYDVPDYA

SEQ ID NO: 2319 - protein, 219 aa, synthetic construct
  source 1..219: note = RNF125.1-L3H16L3-TCF4.1-mycNLS-HA
MGSVLSTDSGKSAPASATARALERRRDPELPVTSFDCAVCLEVLHQPVRTRCGHVFCRSCIATSLKNNKWTCPYCRAYLPSEGVPATDVAKRMKSEYKNCAECDTLVCLSEMRAHIRTCQKYIDKYGPGSGMEELNRVKKDAEAITQGSGDDLGANDELISFKDEGEQEEKSSENSSAERDLADVKSSLVNESETGSGSGSPAAKRVKLDYPYDVPDYA

SEQ ID NO: 2320 - protein, 223 aa, synthetic construct
  source 1..223: note = RNF125.1-L1H124L1-TCF4.1-mycNLS-HA
MGSVLSTDSGKSAPASATARALERRRDPELPVTSFDCAVCLEVLHQPVRTRCGHVFCRSCIATSLKNNKWTCPYCRAYLPSEGVPATDVAKRMKSEYKNCAECDTLVCLSEMRAHIRTCQKYIDKYGPGMEELNRVKKDAEAITQAKNKEAEQGDDLGANDELISFKDEGEQEEKSSENSSAERDLADVKSSLVNESETGSGSGSPAAKRVKLDYPYDVPDYA

SEQ ID NO: 2321 - protein, 224 aa, synthetic construct
  source 1..224: note = RNF125.1-L2H24L1-TCF4.1-mycNLS-HA
MGSVLSTDSGKSAPASATARALERRRDPELPVTSFDCAVCLEVLHQPVRTRCGHVFCRSCIATSLKNNKWTCPYCRAYLPSEGVPATDVAKRMKSEYKNCAECDTLVCLSEMRAHIRTCQKYIDKYGPSGMEELNRVKKDAEAITQAKNKEAEQGDDLGANDELISFKDEGEQEEKSSENSSAERDLADVKSSLVNESETGSGSGSPAAKRVKLDYPYDVPDYA

SEQ ID NO: 2322 - protein, 225 aa, synthetic construct
  source 1..225: note = RNF125.1-L3H24L1-TCF4.1-mycNLS-HA
MGSVLSTDSGKSAPASATARALERRRDPELPVTSFDCAVCLEVLHQPVRTRCGHVFCRSCIATSLKNNKWTCPYCRAYLPSEGVPATDVAKRMKSEYKNCAECDTLVCLSEMRAHIRTCQKYIDKYGPGSGMEELNRVKKDAEAITQAKNKEAEQGDDLGANDELISFKDEGEQEEKSSENSSAERDLADVKSSLVNESETGSGSGSPAAKRVKLDYPYDVPDYA

SEQ ID NO: 2323 - protein, 224 aa, synthetic construct
  source 1..224: note = RNF125.1-L1H24L2-TCF4.1-mycNLS-HA
MGSVLSTDSGKSAPASATARALERRRDPELPVTSFDCAVCLEVLHQPVRTRCGHVFCRSCIATSLKNNKWTCPYCRAYLPSEGVPATDVAKRMKSEYKNCAECDTLVCLSEMRAHIRTCQKYIDKYGPGMEELNRVKKDAEAITQAKNKEAEQGSDDLGANDELISFKDEGEQEEKSSENSSAERDLADVKSSLVNESETGSGSGSPAAKRVKLDYPYDVPDYA

SEQ ID NO: 2324 - protein, 225 aa, synthetic construct
  source 1..225: note = RNF125.1-L2H24L2-TCF4.1-mycNLS-HA
MGSVLSTDSGKSAPASATARALERRRDPELPVTSFDCAVCLEVLHQPVRTRCGHVFCRSCIATSLKNNKWTCPYCRAYLPSEGVPATDVAKRMKSEYKNCAECDTLVCLSEMRAHIRTCQKYIDKYGPSGMEELNRVKKDAEAITQAKNKEAEQGSDDLGANDELISFKDEGEQEEKSSENSSAERDLADVKSSLVNESETGSGSGSPAAKRVKLDYPYDVPDYA

SEQ ID NO: 2325 - protein, 226 aa, synthetic construct
  source 1..226: note = RNF125.1-L3H24L2-TCF4.1-mycNLS-HA
MGSVLSTDSGKSAPASATARALERRRDPELPVTSFDCAVCLEVLHQPVRTRCGHVFCRSCIATSLKNNKWTCPYCRAYLPSEGVPATDVAKRMKSEYKNCAECDTLVCLSEMRAHIRTCQKYIDKYGPGSGMEELNRVKKDAEAITQAKNKEAEQGSDDLGANDELISFKDEGEQEEKSSENSSAERDLADVKSSLVNESETGSGSGSPAAKRVKLDYPYDVPDYA

SEQ ID NO: 2326 - protein, 225 aa, synthetic construct
  source 1..225: note = RNF125.1-L1H24L3-TCF4.1-mycNLS-HA
MGSVLSTDSGKSAPASATARALERRRDPELPVTSFDCAVCLEVLHQPVRTRCGHVFCRSCIATSLKNNKWTCPYCRAYLPSEGVPATDVAKRMKSEYKNCAECDTLVCLSEMRAHIRTCQKYIDKYGPGMEELNRVKKDAEAITQAKNKEAEQGSGDDLGANDELISFKDEGEQEEKSSENSSAERDLADVKSSLVNESETGSGSGSPAAKRVKLDYPYDVPDYA

SEQ ID NO: 2327 - protein, 226 aa, synthetic construct
  source 1..226: note = RNF125.1-L2H24L3-TCF4.1-mycNLS-HA
MGSVLSTDSGKSAPASATARALERRRDPELPVTSFDCAVCLEVLHQPVRTRCGHVFCRSCIATSLKNNKWTCPYCRAYLPSEGVPATDVAKRMKSEYKNCAECDTLVCLSEMRAHIRTCQKYIDKYGPSGMEELNRVKKDAEAITQAKNKEAEQGSGDDLGANDELISFKDEGEQEEKSSENSSAERDLADVKSSLVNESETGSGSGSPAAKRVKLDYPYDVPDYA

SEQ ID NO: 2328 - protein, 227 aa, synthetic construct
  source 1..227: note = RNF125.1-L3H24L3-TCF4.1-mycNLS-HA
MGSVLSTDSGKSAPASATARALERRRDPELPVTSFDCAVCLEVLHQPVRTRCGHVFCRSCIATSLKNNKWTCPYCRAYLPSEGVPATDVAKRMKSEYKNCAECDTLVCLSEMRAHIRTCQKYIDKYGPGSGMEELNRVKKDAEAITQAKNKEAEQGSGDDLGANDELISFKDEGEQEEKSSENSSAERDLADVKSSLVNESETGSGSGSPAAKRVKLDYPYDVPDYA

SEQ ID NO: 2329-2330 - skipped (2 entries)

SEQ ID NO: 2331 - protein, 225 aa, synthetic construct
  source 1..225: note = HA-3xmycNLS-RNF125.1-(GS)5-TCF4.1
MYPYDVPDYAPAAKRVKLDPAAKRVKLDPAAKRVKLDGSGSGSGSVLSTDSGKSAPASATARALERRRDPELPVTSFDCAVCLEVLHQPVRTRCGHVFCRSCIATSLKNNKWTCPYCRAYLPSEGVPATDVAKRMKSEYKNCAECDTLVCLSEMRAHIRTCQKYIDKYGPGSGSGSGSGSDDLGANDELISFKDEGEQEEKSSENSSAERDLADVKSSLVNESET

SEQ ID NO: 2332 - protein, 207 aa, synthetic construct
  source 1..207: note = RNF125.1-(GS)5-TCF4.1-mycNLS-HA
MGSVLSTDSGKSAPASATARALERRRDPELPVTSFDCAVCLEVLHQPVRTRCGHVFCRSCIATSLKNNKWTCPYCRAYLPSEGVPATDVAKRMKSEYKNCAECDTLVCLSEMRAHIRTCQKYIDKYGPGSGSGSGSGSDDLGANDELISFKDEGEQEEKSSENSSAERDLADVKSSLVNESETGSGSGSPAAKRVKLDYPYDVPDYA

SEQ ID NO: 2333 - protein, 225 aa, synthetic construct
  source 1..225: note = RNF125.1-(GS)5-TCF4.1-3xmycNLS-HA
MGSVLSTDSGKSAPASATARALERRRDPELPVTSFDCAVCLEVLHQPVRTRCGHVFCRSCIATSLKNNKWTCPYCRAYLPSEGVPATDVAKRMKSEYKNCAECDTLVCLSEMRAHIRTCQKYIDKYGPGSGSGSGSGSDDLGANDELISFKDEGEQEEKSSENSSAERDLADVKSSLVNESETGSGSGSPAAKRVKLDPAAKRVKLDPAAKRVKLDYPYDVPDYA

SEQ ID NO: 2334 - protein, 205 aa, synthetic construct
  source 1..205: note = HA-svNLS-RNF125.1-(GS)5-TCF4.1
MYPYDVPDYAPKKKRKVGSGSGSGSVLSTDSGKSAPASATARALERRRDPELPVTSFDCAVCLEVLHQPVRTRCGHVFCRSCIATSLKNNKWTCPYCRAYLPSEGVPATDVAKRMKSEYKNCAECDTLVCLSEMRAHIRTCQKYIDKYGPGSGSGSGSGSDDLGANDELISFKDEGEQEEKSSENSSAERDLADVKSSLVNESET

SEQ ID NO: 2335 - protein, 219 aa, synthetic construct
  source 1..219: note = HA-3xsvNLS-RNF125.1-(GS)5-TCF4.1
MYPYDVPDYAPKKKRKVPKKKRKVPKKKRKVGSGSGSGSVLSTDSGKSAPASATARALERRRDPELPVTSFDCAVCLEVLHQPVRTRCGHVFCRSCIATSLKNNKWTCPYCRAYLPSEGVPATDVAKRMKSEYKNCAECDTLVCLSEMRAHIRTCQKYIDKYGPGSGSGSGSGSDDLGANDELISFKDEGEQEEKSSENSSAERDLADVKSSLVNESET

SEQ ID NO: 2336 - protein, 205 aa, synthetic construct
  source 1..205: note = RNF125.1-(GS)5-TCF4.1-svNLS-HA
MGSVLSTDSGKSAPASATARALERRRDPELPVTSFDCAVCLEVLHQPVRTRCGHVFCRSCIATSLKNNKWTCPYCRAYLPSEGVPATDVAKRMKSEYKNCAECDTLVCLSEMRAHIRTCQKYIDKYGPGSGSGSGSGSDDLGANDELISFKDEGEQEEKSSENSSAERDLADVKSSLVNESETGSGSGSPKKKRKVYPYDVPDYA

SEQ ID NO: 2337 - protein, 219 aa, synthetic construct
  source 1..219: note = RNF125.1-(GS)5-TCF4.1-3xsvNLS-HA
MGSVLSTDSGKSAPASATARALERRRDPELPVTSFDCAVCLEVLHQPVRTRCGHVFCRSCIATSLKNNKWTCPYCRAYLPSEGVPATDVAKRMKSEYKNCAECDTLVCLSEMRAHIRTCQKYIDKYGPGSGSGSGSGSDDLGANDELISFKDEGEQEEKSSENSSAERDLADVKSSLVNESETGSGSGSPKKKRKVPKKKRKVPKKKRKVYPYDVPDYA

SEQ ID NO: 2338 - protein, 218 aa, synthetic construct
  source 1..218: note = HA-nlpNLS-RNF125.1-(GS)5-TCF4.1
MYPYDVPDYAAVKRPAATKKAGQAKKKKLDGSGSGSGSVLSTDSGKSAPASATARALERRRDPELPVTSFDCAVCLEVLHQPVRTRCGHVFCRSCIATSLKNNKWTCPYCRAYLPSEGVPATDVAKRMKSEYKNCAECDTLVCLSEMRAHIRTCQKYIDKYGPGSGSGSGSGSDDLGANDELISFKDEGEQEEKSSENSSAERDLADVKSSLVNESET

SEQ ID NO: 2339 - protein, 218 aa, synthetic construct
  source 1..218: note = RNF125.1-(GS)5-TCF4.1-nlpNLS-HA
MGSVLSTDSGKSAPASATARALERRRDPELPVTSFDCAVCLEVLHQPVRTRCGHVFCRSCIATSLKNNKWTCPYCRAYLPSEGVPATDVAKRMKSEYKNCAECDTLVCLSEMRAHIRTCQKYIDKYGPGSGSGSGSGSDDLGANDELISFKDEGEQEEKSSENSSAERDLADVKSSLVNESETGSGSGSAVKRPAATKKAGQAKKKKLDYPYDVPDYA

SEQ ID NO: 2340 - protein, 219 aa, synthetic construct
  source 1..219: note = HA-bpNLS-RNF125.1-(GS)5-TCF4.1
MYPYDVPDYAGKRKLITSEEERSPAKRGRKSGSGSGSGSVLSTDSGKSAPASATARALERRRDPELPVTSFDCAVCLEVLHQPVRTRCGHVFCRSCIATSLKNNKWTCPYCRAYLPSEGVPATDVAKRMKSEYKNCAECDTLVCLSEMRAHIRTCQKYIDKYGPGSGSGSGSGSDDLGANDELISFKDEGEQEEKSSENSSAERDLADVKSSLVNESET

SEQ ID NO: 2341 - protein, 219 aa, synthetic construct
  source 1..219: note = RNF125.1-(GS)5-TCF4.1-bpNLS-HA
MGSVLSTDSGKSAPASATARALERRRDPELPVTSFDCAVCLEVLHQPVRTRCGHVFCRSCIATSLKNNKWTCPYCRAYLPSEGVPATDVAKRMKSEYKNCAECDTLVCLSEMRAHIRTCQKYIDKYGPGSGSGSGSGSDDLGANDELISFKDEGEQEEKSSENSSAERDLADVKSSLVNESETGSGSGSGKRKLITSEEERSPAKRGRKSYPYDVPDYA

SEQ ID NO: 2342 - protein, 225 aa, synthetic construct
  source 1..225: note = HA-hrpNLS-RNF125.1-(GS)5-TCF4.1
MYPYDVPDYARSGGNHRRNGRGGRGGYNRRNNGYHPYGSGSGSGSVLSTDSGKSAPASATARALERRRDPELPVTSFDCAVCLEVLHQPVRTRCGHVFCRSCIATSLKNNKWTCPYCRAYLPSEGVPATDVAKRMKSEYKNCAECDTLVCLSEMRAHIRTCQKYIDKYGPGSGSGSGSGSDDLGANDELISFKDEGEQEEKSSENSSAERDLADVKSSLVNESET

SEQ ID NO: 2343 - protein, 225 aa, synthetic construct
  source 1..225: note = RNF125.1-(GS)5-TCF4.1-hrpNLS-HA
MGSVLSTDSGKSAPASATARALERRRDPELPVTSFDCAVCLEVLHQPVRTRCGHVFCRSCIATSLKNNKWTCPYCRAYLPSEGVPATDVAKRMKSEYKNCAECDTLVCLSEMRAHIRTCQKYIDKYGPGSGSGSGSGSDDLGANDELISFKDEGEQEEKSSENSSAERDLADVKSSLVNESETGSGSGSRSGGNHRRNGRGGRGGYNRRNNGYHPYYPYDVPDYA

SEQ ID NO: 2344 - protein, 233 aa, synthetic construct
  source 1..233: note = mycNLS-RNF125.1-(GS)5-TCF4.1-nlpNLS-HA
MPAAKRVKLDGSGSGSGSVLSTDSGKSAPASATARALERRRDPELPVTSFDCAVCLEVLHQPVRTRCGHVFCRSCIATSLKNNKWTCPYCRAYLPSEGVPATDVAKRMKSEYKNCAECDTLVCLSEMRAHIRTCQKYIDKYGPGSGSGSGSGSDDLGANDELISFKDEGEQEEKSSENSSAERDLADVKSSLVNESETGSGSGSAVKRPAATKKAGQAKKKKLDYPYDVPDYA

SEQ ID NO: 2345 - protein, 233 aa, synthetic construct
  source 1..233: note = HA-nlpNLS-RNF125.1-(GS)5-TCF4.1-mycNLS
MYPYDVPDYAAVKRPAATKKAGQAKKKKLDGSGSGSGSVLSTDSGKSAPASATARALERRRDPELPVTSFDCAVCLEVLHQPVRTRCGHVFCRSCIATSLKNNKWTCPYCRAYLPSEGVPATDVAKRMKSEYKNCAECDTLVCLSEMRAHIRTCQKYIDKYGPGSGSGSGSGSDDLGANDELISFKDEGEQEEKSSENSSAERDLADVKSSLVNESETGSGSGSPAAKRVKLD

SEQ ID NO: 2346 - protein, 231 aa, synthetic construct
  source 1..231: note = svNLS-RNF125.1-(GS)5-TCF4.1-nlpNLS-HA
MPKKKRKVGSGSGSGSVLSTDSGKSAPASATARALERRRDPELPVTSFDCAVCLEVLHQPVRTRCGHVFCRSCIATSLKNNKWTCPYCRAYLPSEGVPATDVAKRMKSEYKNCAECDTLVCLSEMRAHIRTCQKYIDKYGPGSGSGSGSGSDDLGANDELISFKDEGEQEEKSSENSSAERDLADVKSSLVNESETGSGSGSAVKRPAATKKAGQAKKKKLDYPYDVPDYA

SEQ ID NO: 2347 - protein, 231 aa, synthetic construct
  source 1..231: note = HA-nlpNLS-RNF125.1-(GS)5-TCF4.1-svNLS
MYPYDVPDYAAVKRPAATKKAGQAKKKKLDGSGSGSGSVLSTDSGKSAPASATARALERRRDPELPVTSFDCAVCLEVLHQPVRTRCGHVFCRSCIATSLKNNKWTCPYCRAYLPSEGVPATDVAKRMKSEYKNCAECDTLVCLSEMRAHIRTCQKYIDKYGPGSGSGSGSGSDDLGANDELISFKDEGEQEEKSSENSSAERDLADVKSSLVNESETGSGSGSPKKKRKV

SEQ ID NO: 2348 - protein, 234 aa, synthetic construct
  source 1..234: note = mycNLS-RNF125.1-(GS)5-TCF4.1-bpNLS-HA
MPAAKRVKLDGSGSGSGSVLSTDSGKSAPASATARALERRRDPELPVTSFDCAVCLEVLHQPVRTRCGHVFCRSCIATSLKNNKWTCPYCRAYLPSEGVPATDVAKRMKSEYKNCAECDTLVCLSEMRAHIRTCQKYIDKYGPGSGSGSGSGSDDLGANDELISFKDEGEQEEKSSENSSAERDLADVKSSLVNESETGSGSGSGKRKLITSEEERSPAKRGRKSYPYDVPDYA

SEQ ID NO: 2349 - protein, 234 aa, synthetic construct
  source 1..234: note = HA-bpNLS-RNF125.1-(GS)5-TCF4.1-mycNLS
MYPYDVPDYAGKRKLITSEEERSPAKRGRKSGSGSGSGSVLSTDSGKSAPASATARALERRRDPELPVTSFDCAVCLEVLHQPVRTRCGHVFCRSCIATSLKNNKWTCPYCRAYLPSEGVPATDVAKRMKSEYKNCAECDTLVCLSEMRAHIRTCQKYIDKYGPGSGSGSGSGSDDLGANDELISFKDEGEQEEKSSENSSAERDLADVKSSLVNESETGSGSGSPAAKRVKLD

SEQ ID NO: 2350 - protein, 232 aa, synthetic construct
  source 1..232: note = svNLS-RNF125.1-(GS)5-TCF4.1-bpNLS-HA
MPKKKRKVGSGSGSGSVLSTDSGKSAPASATARALERRRDPELPVTSFDCAVCLEVLHQPVRTRCGHVFCRSCIATSLKNNKWTCPYCRAYLPSEGVPATDVAKRMKSEYKNCAECDTLVCLSEMRAHIRTCQKYIDKYGPGSGSGSGSGSDDLGANDELISFKDEGEQEEKSSENSSAERDLADVKSSLVNESETGSGSGSGKRKLITSEEERSPAKRGRKSYPYDVPDYA

SEQ ID NO: 2351 - protein, 232 aa, synthetic construct
  source 1..232: note = HA-bpNLS-RNF125.1-(GS)5-TCF4.1-svNLS
MYPYDVPDYAGKRKLITSEEERSPAKRGRKSGSGSGSGSVLSTDSGKSAPASATARALERRRDPELPVTSFDCAVCLEVLHQPVRTRCGHVFCRSCIATSLKNNKWTCPYCRAYLPSEGVPATDVAKRMKSEYKNCAECDTLVCLSEMRAHIRTCQKYIDKYGPGSGSGSGSGSDDLGANDELISFKDEGEQEEKSSENSSAERDLADVKSSLVNESETGSGSGSPKKKRKV

SEQ ID NO: 2352 - protein, 134 aa, synthetic construct
  source 1..134: note = HA-3xmycNLS-DCAF1.1-(GS)5-TCF4.1
MGYPYDVPDYAPAAKRVKLDPAAKRVKLDPAAKRVKLDGSGSGSQAPINFTSRLNRRASFPKYGGVDGGCFDRHLIFSRGSGSGSGSGSDDLGANDELISFKDEGEQEEKSSENSSAERDLADVKSSLVNESET

SEQ ID NO: 2353 - protein, 116 aa, synthetic construct
  source 1..116: note = DCAF1.1-(GS)5-TCF4.1-mycNLS-HA
MGQAPINFTSRLNRRASFPKYGGVDGGCFDRHLIFSRGSGSGSGSGSDDLGANDELISFKDEGEQEEKSSENSSAERDLADVKSSLVNESETGSGSGSPAAKRVKLDYPYDVPDYA

SEQ ID NO: 2354 - protein, 134 aa, synthetic construct
  source 1..134: note = DCAF1.1-(GS)5-TCF4.1-3xmycNLS-HA
MGQAPINFTSRLNRRASFPKYGGVDGGCFDRHLIFSRGSGSGSGSGSDDLGANDELISFKDEGEQEEKSSENSSAERDLADVKSSLVNESETGSGSGSPAAKRVKLDPAAKRVKLDPAAKRVKLDYPYDVPDYA

SEQ ID NO: 2355 - protein, 114 aa, synthetic construct
  source 1..114: note = HA-svNLS-DCAF1.1-(GS)5-TCF4.1
MGYPYDVPDYAPKKKRKVGSGSGSQAPINFTSRLNRRASFPKYGGVDGGCFDRHLIFSRGSGSGSGSGSDDLGANDELISFKDEGEQEEKSSENSSAERDLADVKSSLVNESET

SEQ ID NO: 2356 - protein, 128 aa, synthetic construct
  source 1..128: note = HA-3xsvNLS-DCAF1.1-(GS)5-TCF4.1
MGYPYDVPDYAPKKKRKVPKKKRKVPKKKRKVGSGSGSQAPINFTSRLNRRASFPKYGGVDGGCFDRHLIFSRGSGSGSGSGSDDLGANDELISFKDEGEQEEKSSENSSAERDLADVKSSLVNESET

SEQ ID NO: 2357 - protein, 114 aa, synthetic construct
  source 1..114: note = DCAF1.1-(GS)5-TCF4.1-svNLS-HA
MGQAPINFTSRLNRRASFPKYGGVDGGCFDRHLIFSRGSGSGSGSGSDDLGANDELISFKDEGEQEEKSSENSSAERDLADVKSSLVNESETGSGSGSPKKKRKVYPYDVPDYA

SEQ ID NO: 2358 - protein, 128 aa, synthetic construct
  source 1..128: note = DCAF1.1-(GS)5-TCF4.1-3xsvNLS-HA
MGQAPINFTSRLNRRASFPKYGGVDGGCFDRHLIFSRGSGSGSGSGSDDLGANDELISFKDEGEQEEKSSENSSAERDLADVKSSLVNESETGSGSGSPKKKRKVPKKKRKVPKKKRKVYPYDVPDYA

SEQ ID NO: 2359 - protein, 127 aa, synthetic construct
  source 1..127: note = HA-nlpNLS-DCAF1.1-(GS)5-TCF4.1
MGYPYDVPDYAAVKRPAATKKAGQAKKKKLDGSGSGSQAPINFTSRLNRRASFPKYGGVDGGCFDRHLIFSRGSGSGSGSGSDDLGANDELISFKDEGEQEEKSSENSSAERDLADVKSSLVNESET

SEQ ID NO: 2360 - protein, 127 aa, synthetic construct
  source 1..127: note = DCAF1.1-(GS)5-TCF4.1-nlpNLS-HA
MGQAPINFTSRLNRRASFPKYGGVDGGCFDRHLIFSRGSGSGSGSGSDDLGANDELISFKDEGEQEEKSSENSSAERDLADVKSSLVNESETGSGSGSAVKRPAATKKAGQAKKKKLDYPYDVPDYA

SEQ ID NO: 2361 - protein, 128 aa, synthetic construct
  source 1..128: note = HA-bpNLS-DCAF1.1-(GS)5-TCF4.1
MGYPYDVPDYAGKRKLITSEEERSPAKRGRKSGSGSGSQAPINFTSRLNRRASFPKYGGVDGGCFDRHLIFSRGSGSGSGSGSDDLGANDELISFKDEGEQEEKSSENSSAERDLADVKSSLVNESET

SEQ ID NO: 2362 - protein, 128 aa, synthetic construct
  source 1..128: note = DCAF1.1-(GS)5-TCF4.1-bpNLS-HA
MGQAPINFTSRLNRRASFPKYGGVDGGCFDRHLIFSRGSGSGSGSGSDDLGANDELISFKDEGEQEEKSSENSSAERDLADVKSSLVNESETGSGSGSGKRKLITSEEERSPAKRGRKSYPYDVPDYA

SEQ ID NO: 2363 - protein, 134 aa, synthetic construct
  source 1..134: note = HA-hrpNLS-DCAF1.1-(GS)5-TCF4.1
MGYPYDVPDYARSGGNHRRNGRGGRGGYNRRNNGYHPYGSGSGSQAPINFTSRLNRRASFPKYGGVDGGCFDRHLIFSRGSGSGSGSGSDDLGANDELISFKDEGEQEEKSSENSSAERDLADVKSSLVNESET

SEQ ID NO: 2364 - protein, 134 aa, synthetic construct
  source 1..134: note = DCAF1.1-(GS)5-TCF4.1-hrpNLS-HA
MGQAPINFTSRLNRRASFPKYGGVDGGCFDRHLIFSRGSGSGSGSGSDDLGANDELISFKDEGEQEEKSSENSSAERDLADVKSSLVNESETGSGSGSRSGGNHRRNGRGGRGGYNRRNNGYHPYYPYDVPDYA

SEQ ID NO: 2365 - protein, 142 aa, synthetic construct
  source 1..142: note = mycNLS-DCAF1.1-(GS)5-TCF4.1-nlpNLS-HA
MGPAAKRVKLDGSGSGSQAPINFTSRLNRRASFPKYGGVDGGCFDRHLIFSRGSGSGSGSGSDDLGANDELISFKDEGEQEEKSSENSSAERDLADVKSSLVNESETGSGSGSAVKRPAATKKAGQAKKKKLDYPYDVPDYA

SEQ ID NO: 2366 - protein, 142 aa, synthetic construct
  source 1..142: note = HA-nlpNLS-DCAF1.1-(GS)5-TCF4.1-mycNLS
MGYPYDVPDYAAVKRPAATKKAGQAKKKKLDGSGSGSQAPINFTSRLNRRASFPKYGGVDGGCFDRHLIFSRGSGSGSGSGSDDLGANDELISFKDEGEQEEKSSENSSAERDLADVKSSLVNESETGSGSGSPAAKRVKLD

SEQ ID NO: 2367 - protein, 140 aa, synthetic construct
  source 1..140: note = svNLS-DCAF1.1-(GS)5-TCF4.1-nlpNLS-HA
MGPKKKRKVGSGSGSQAPINFTSRLNRRASFPKYGGVDGGCFDRHLIFSRGSGSGSGSGSDDLGANDELISFKDEGEQEEKSSENSSAERDLADVKSSLVNESETGSGSGSAVKRPAATKKAGQAKKKKLDYPYDVPDYA

SEQ ID NO: 2368 - protein, 140 aa, synthetic construct
  source 1..140: note = HA-nlpNLS-DCAF1.1-(GS)5-TCF4.1-svNLS
MGYPYDVPDYAAVKRPAATKKAGQAKKKKLDGSGSGSQAPINFTSRLNRRASFPKYGGVDGGCFDRHLIFSRGSGSGSGSGSDDLGANDELISFKDEGEQEEKSSENSSAERDLADVKSSLVNESETGSGSGSPKKKRKV

SEQ ID NO: 2369 - protein, 143 aa, synthetic construct
  source 1..143: note = mycNLS-DCAF1.1-(GS)5-TCF4.1-bpNLS-HA
MGPAAKRVKLDGSGSGSQAPINFTSRLNRRASFPKYGGVDGGCFDRHLIFSRGSGSGSGSGSDDLGANDELISFKDEGEQEEKSSENSSAERDLADVKSSLVNESETGSGSGSGKRKLITSEEERSPAKRGRKSYPYDVPDYA

SEQ ID NO: 2370 - protein, 143 aa, synthetic construct
  source 1..143: note = HA-bpNLS-DCAF1.1-(GS)5-TCF4.1-mycNLS
MGYPYDVPDYAGKRKLITSEEERSPAKRGRKSGSGSGSQAPINFTSRLNRRASFPKYGGVDGGCFDRHLIFSRGSGSGSGSGSDDLGANDELISFKDEGEQEEKSSENSSAERDLADVKSSLVNESETGSGSGSPAAKRVKLD

SEQ ID NO: 2371 - protein, 141 aa, synthetic construct
  source 1..141: note = svNLS-DCAF1.1-(GS)5-TCF4.1-bpNLS-HA
MGPKKKRKVGSGSGSQAPINFTSRLNRRASFPKYGGVDGGCFDRHLIFSRGSGSGSGSGSDDLGANDELISFKDEGEQEEKSSENSSAERDLADVKSSLVNESETGSGSGSGKRKLITSEEERSPAKRGRKSYPYDVPDYA

SEQ ID NO: 2372 - protein, 141 aa, synthetic construct
  source 1..141: note = HA-bpNLS-DCAF1.1-(GS)5-TCF4.1-svNLS
MGYPYDVPDYAGKRKLITSEEERSPAKRGRKSGSGSGSQAPINFTSRLNRRASFPKYGGVDGGCFDRHLIFSRGSGSGSGSGSDDLGANDELISFKDEGEQEEKSSENSSAERDLADVKSSLVNESETGSGSGSPKKKRKV

SEQ ID NO: 2373 - protein, 207 aa, synthetic construct
  source 1..207: note = HA-RNF125.1-(GS)3-TCF4.1-spNLS
MYPYDVPDYAGSVLSTDSGKSAPASATARALERRRDPELPVTSFDCAVCLEVLHQPVRTRCGHVFCRSCIATSLKNNKWTCPYCRAYLPSEGVPATDVAKRMKSEYKNCAECDTLVCLSEMRAHIRTCQKYIDKYGPGSGSGSDDLGANDELISFKDEGEQEEKSSENSSAERDLADVKSSLVNESETGGGSGSPFLGPPRKRLKQS

SEQ ID NO: 2374 - protein, 195 aa, synthetic construct
  source 1..195: note = HA-3xmycNLS-RNF125.2-(GS)5-TCF4.1
MGYPYDVPDYAPAAKRVKLDPAAKRVKLDPAAKRVKLDGSGSGSTSFDCAVCLEVLHQPVRTRCGHVFCRSCIATSLKNNKWTCPYCRAYLPSEGVPATDVAKRMKSEYKNCAECDTLVCLSEMRAHIRTCQKYIDKYGPGSGSGSGSGSDDLGANDELISFKDEGEQEEKSSENSSAERDLADVKSSLVNESET

SEQ ID NO: 2375 - protein, 177 aa, synthetic construct
  source 1..177: note = RNF125.2-(GS)5-TCF4.1-mycNLS-HA
MGTSFDCAVCLEVLHQPVRTRCGHVFCRSCIATSLKNNKWTCPYCRAYLPSEGVPATDVAKRMKSEYKNCAECDTLVCLSEMRAHIRTCQKYIDKYGPGSGSGSGSGSDDLGANDELISFKDEGEQEEKSSENSSAERDLADVKSSLVNESETGSGSGSPAAKRVKLDYPYDVPDYA

SEQ ID NO: 2376 - protein, 195 aa, synthetic construct
  source 1..195: note = RNF125.2-(GS)5-TCF4.1-3xmycNLS-HA
MGTSFDCAVCLEVLHQPVRTRCGHVFCRSCIATSLKNNKWTCPYCRAYLPSEGVPATDVAKRMKSEYKNCAECDTLVCLSEMRAHIRTCQKYIDKYGPGSGSGSGSGSDDLGANDELISFKDEGEQEEKSSENSSAERDLADVKSSLVNESETGSGSGSPAAKRVKLDPAAKRVKLDPAAKRVKLDYPYDVPDYA

SEQ ID NO: 2377 - protein, 175 aa, synthetic construct
  source 1..175: note = HA-svNLS-RNF125.2-(GS)5-TCF4.1
MGYPYDVPDYAPKKKRKVGSGSGSTSFDCAVCLEVLHQPVRTRCGHVFCRSCIATSLKNNKWTCPYCRAYLPSEGVPATDVAKRMKSEYKNCAECDTLVCLSEMRAHIRTCQKYIDKYGPGSGSGSGSGSDDLGANDELISFKDEGEQEEKSSENSSAERDLADVKSSLVNESET

SEQ ID NO: 2378 - protein, 189 aa, synthetic construct
  source 1..189: note = HA-3xsvNLS-RNF125.2-(GS)5-TCF4.1
MGYPYDVPDYAPKKKRKVPKKKRKVPKKKRKVGSGSGSTSFDCAVCLEVLHQPVRTRCGHVFCRSCIATSLKNNKWTCPYCRAYLPSEGVPATDVAKRMKSEYKNCAECDTLVCLSEMRAHIRTCQKYIDKYGPGSGSGSGSGSDDLGANDELISFKDEGEQEEKSSENSSAERDLADVKSSLVNESET

SEQ ID NO: 2379 - protein, 175 aa, synthetic construct
  source 1..175: note = RNF125.2-(GS)5-TCF4.1-svNLS-HA
MGTSFDCAVCLEVLHQPVRTRCGHVFCRSCIATSLKNNKWTCPYCRAYLPSEGVPATDVAKRMKSEYKNCAECDTLVCLSEMRAHIRTCQKYIDKYGPGSGSGSGSGSDDLGANDELISFKDEGEQEEKSSENSSAERDLADVKSSLVNESETGSGSGSPKKKRKVYPYDVPDYA

SEQ ID NO: 2380 - protein, 189 aa, synthetic construct
  source 1..189: note = RNF125.2-(GS)5-TCF4.1-3xsvNLS-HA
MGTSFDCAVCLEVLHQPVRTRCGHVFCRSCIATSLKNNKWTCPYCRAYLPSEGVPATDVAKRMKSEYKNCAECDTLVCLSEMRAHIRTCQKYIDKYGPGSGSGSGSGSDDLGANDELISFKDEGEQEEKSSENSSAERDLADVKSSLVNESETGSGSGSPKKKRKVPKKKRKVPKKKRKVYPYDVPDYA

SEQ ID NO: 2381 - protein, 188 aa, synthetic construct
  source 1..188: note = HA-nlpNLS-RNF125.2-(GS)5-TCF4.1
MGYPYDVPDYAAVKRPAATKKAGQAKKKKLDGSGSGSTSFDCAVCLEVLHQPVRTRCGHVFCRSCIATSLKNNKWTCPYCRAYLPSEGVPATDVAKRMKSEYKNCAECDTLVCLSEMRAHIRTCQKYIDKYGPGSGSGSGSGSDDLGANDELISFKDEGEQEEKSSENSSAERDLADVKSSLVNESET

SEQ ID NO: 2382 - protein, 188 aa, synthetic construct
  source 1..188: note = RNF125.2-(GS)5-TCF4.1-nlpNLS-HA
MGTSFDCAVCLEVLHQPVRTRCGHVFCRSCIATSLKNNKWTCPYCRAYLPSEGVPATDVAKRMKSEYKNCAECDTLVCLSEMRAHIRTCQKYIDKYGPGSGSGSGSGSDDLGANDELISFKDEGEQEEKSSENSSAERDLADVKSSLVNESETGSGSGSAVKRPAATKKAGQAKKKKLDYPYDVPDYA

SEQ ID NO: 2383 - protein, 189 aa, synthetic construct
  source 1..189: note = HA-bpNLS-RNF125.2-(GS)5-TCF4.1
MGYPYDVPDYAGKRKLITSEEERSPAKRGRKSGSGSGSTSFDCAVCLEVLHQPVRTRCGHVFCRSCIATSLKNNKWTCPYCRAYLPSEGVPATDVAKRMKSEYKNCAECDTLVCLSEMRAHIRTCQKYIDKYGPGSGSGSGSGSDDLGANDELISFKDEGEQEEKSSENSSAERDLADVKSSLVNESET

SEQ ID NO: 2384 - protein, 189 aa, synthetic construct
  source 1..189: note = RNF125.2-(GS)5-TCF4.1-bpNLS-HA
MGTSFDCAVCLEVLHQPVRTRCGHVFCRSCIATSLKNNKWTCPYCRAYLPSEGVPATDVAKRMKSEYKNCAECDTLVCLSEMRAHIRTCQKYIDKYGPGSGSGSGSGSDDLGANDELISFKDEGEQEEKSSENSSAERDLADVKSSLVNESETGSGSGSGKRKLITSEEERSPAKRGRKSYPYDVPDYA

SEQ ID NO: 2385 - protein, 195 aa, synthetic construct
  source 1..195: note = HA-hrpNLS-RNF125.2-(GS)5-TCF4.1
MGYPYDVPDYARSGGNHRRNGRGGRGGYNRRNNGYHPYGSGSGSTSFDCAVCLEVLHQPVRTRCGHVFCRSCIATSLKNNKWTCPYCRAYLPSEGVPATDVAKRMKSEYKNCAECDTLVCLSEMRAHIRTCQKYIDKYGPGSGSGSGSGSDDLGANDELISFKDEGEQEEKSSENSSAERDLADVKSSLVNESET

SEQ ID NO: 2386 - protein, 195 aa, synthetic construct
  source 1..195: note = RNF125.2-(GS)5-TCF4.1-hrpNLS-HA
MGTSFDCAVCLEVLHQPVRTRCGHVFCRSCIATSLKNNKWTCPYCRAYLPSEGVPATDVAKRMKSEYKNCAECDTLVCLSEMRAHIRTCQKYIDKYGPGSGSGSGSGSDDLGANDELISFKDEGEQEEKSSENSSAERDLADVKSSLVNESETGSGSGSRSGGNHRRNGRGGRGGYNRRNNGYHPYYPYDVPDYA

SEQ ID NO: 2387 - protein, 203 aa, synthetic construct
  source 1..203: note = mycNLS-RNF125.2-(GS)5-TCF4.1-nlpNLS-HA
MGPAAKRVKLDGSGSGSTSFDCAVCLEVLHQPVRTRCGHVFCRSCIATSLKNNKWTCPYCRAYLPSEGVPATDVAKRMKSEYKNCAECDTLVCLSEMRAHIRTCQKYIDKYGPGSGSGSGSGSDDLGANDELISFKDEGEQEEKSSENSSAERDLADVKSSLVNESETGSGSGSAVKRPAATKKAGQAKKKKLDYPYDVPDYA

SEQ ID NO: 2388 - protein, 203 aa, synthetic construct
  source 1..203: note = HA-nlpNLS-RNF125.2-(GS)5-TCF4.1-mycNLS
MGYPYDVPDYAAVKRPAATKKAGQAKKKKLDGSGSGSTSFDCAVCLEVLHQPVRTRCGHVFCRSCIATSLKNNKWTCPYCRAYLPSEGVPATDVAKRMKSEYKNCAECDTLVCLSEMRAHIRTCQKYIDKYGPGSGSGSGSGSDDLGANDELISFKDEGEQEEKSSENSSAERDLADVKSSLVNESETGSGSGSPAAKRVKLD

SEQ ID NO: 2389 - protein, 201 aa, synthetic construct
  source 1..201: note = svNLS-RNF125.2-(GS)5-TCF4.1-nlpNLS-HA
MGPKKKRKVGSGSGSTSFDCAVCLEVLHQPVRTRCGHVFCRSCIATSLKNNKWTCPYCRAYLPSEGVPATDVAKRMKSEYKNCAECDTLVCLSEMRAHIRTCQKYIDKYGPGSGSGSGSGSDDLGANDELISFKDEGEQEEKSSENSSAERDLADVKSSLVNESETGSGSGSAVKRPAATKKAGQAKKKKLDYPYDVPDYA

SEQ ID NO: 2390 - protein, 201 aa, synthetic construct
  source 1..201: note = HA-nlpNLS-RNF125.2-(GS)5-TCF4.1-svNLS
MGYPYDVPDYAAVKRPAATKKAGQAKKKKLDGSGSGSTSFDCAVCLEVLHQPVRTRCGHVFCRSCIATSLKNNKWTCPYCRAYLPSEGVPATDVAKRMKSEYKNCAECDTLVCLSEMRAHIRTCQKYIDKYGPGSGSGSGSGSDDLGANDELISFKDEGEQEEKSSENSSAERDLADVKSSLVNESETGSGSGSPKKKRKV

SEQ ID NO: 2391 - protein, 204 aa, synthetic construct
  source 1..204: note = mycNLS-RNF125.2-(GS)5-TCF4.1-bpNLS-HA
MGPAAKRVKLDGSGSGSTSFDCAVCLEVLHQPVRTRCGHVFCRSCIATSLKNNKWTCPYCRAYLPSEGVPATDVAKRMKSEYKNCAECDTLVCLSEMRAHIRTCQKYIDKYGPGSGSGSGSGSDDLGANDELISFKDEGEQEEKSSENSSAERDLADVKSSLVNESETGSGSGSGKRKLITSEEERSPAKRGRKSYPYDVPDYA

SEQ ID NO: 2392 - protein, 204 aa, synthetic construct
  source 1..204: note = HA-bpNLS-RNF125.2-(GS)5-TCF4.1-mycNLS
MGYPYDVPDYAGKRKLITSEEERSPAKRGRKSGSGSGSTSFDCAVCLEVLHQPVRTRCGHVFCRSCIATSLKNNKWTCPYCRAYLPSEGVPATDVAKRMKSEYKNCAECDTLVCLSEMRAHIRTCQKYIDKYGPGSGSGSGSGSDDLGANDELISFKDEGEQEEKSSENSSAERDLADVKSSLVNESETGSGSGSPAAKRVKLD

SEQ ID NO: 2393 - protein, 202 aa, synthetic construct
  source 1..202: note = svNLS-RNF125.2-(GS)5-TCF4.1-bpNLS-HA
MGPKKKRKVGSGSGSTSFDCAVCLEVLHQPVRTRCGHVFCRSCIATSLKNNKWTCPYCRAYLPSEGVPATDVAKRMKSEYKNCAECDTLVCLSEMRAHIRTCQKYIDKYGPGSGSGSGSGSDDLGANDELISFKDEGEQEEKSSENSSAERDLADVKSSLVNESETGSGSGSGKRKLITSEEERSPAKRGRKSYPYDVPDYA

SEQ ID NO: 2394 - protein, 202 aa, synthetic construct
  source 1..202: note = HA-bpNLS-RNF125.2-(GS)5-TCF4.1-svNLS
MGYPYDVPDYAGKRKLITSEEERSPAKRGRKSGSGSGSTSFDCAVCLEVLHQPVRTRCGHVFCRSCIATSLKNNKWTCPYCRAYLPSEGVPATDVAKRMKSEYKNCAECDTLVCLSEMRAHIRTCQKYIDKYGPGSGSGSGSGSDDLGANDELISFKDEGEQEEKSSENSSAERDLADVKSSLVNESETGSGSGSPKKKRKV

SEQ ID NO: 2395 - protein, 165 aa, synthetic construct
  source 1..165: note = HA-mycNLS-TCF4.1-(GS)1-NHLRC1.1
MGYPYDVPDYAPAAKRVKLDGSGSGSDDLGANDELISFKDEGEQEEKSSENSSAERDLADVKSSLVNESETGSESGPALHELMREAEISLLECKVCFEKFGHRQQRRPRNLSCGHVVCLACVAALAHPRTLALECPFCRRACRGCDTSDCLPVLHLIELLGSALR

SEQ ID NO: 2396 - protein, 175 aa, synthetic construct
  source 1..175: note = HA-mycNLS-TCF4.1-(GS)6-NHLRC1.1
MGYPYDVPDYAPAAKRVKLDGSGSGSDDLGANDELISFKDEGEQEEKSSENSSAERDLADVKSSLVNESETGSGSGSGSGSGSESGPALHELMREAEISLLECKVCFEKFGHRQQRRPRNLSCGHVVCLACVAALAHPRTLALECPFCRRACRGCDTSDCLPVLHLIELLGSALR

SEQ ID NO: 2397 - protein, 163 aa, synthetic construct
  source 1..163: note = HA-mycNLS-TCF4.1-NHLRC1.1
MGYPYDVPDYAPAAKRVKLDGSGSGSDDLGANDELISFKDEGEQEEKSSENSSAERDLADVKSSLVNESETESGPALHELMREAEISLLECKVCFEKFGHRQQRRPRNLSCGHVVCLACVAALAHPRTLALECPFCRRACRGCDTSDCLPVLHLIELLGSALR

SEQ ID NO: 2398 - protein, 161 aa, synthetic construct
  source 1..161: note = HA-mycNLS-TCF4.1-NHLRC1.2
MGYPYDVPDYAPAAKRVKLDGSGSGSDDLGANDELISFKDEGEQEEKSSENSSAERDLADVKSSLVNESETGPALHELMREAEISLLECKVCFEKFGHRQQRRPRNLSCGHVVCLACVAALAHPRTLALECPFCRRACRGCDTSDCLPVLHLIELLGSALR

SEQ ID NO: 2399 - protein, 159 aa, synthetic construct
  source 1..159: note = HA-mycNLS-TCF4.9-NHLRC1.1
MGYPYDVPDYAPAAKRVKLDGSGSGSDDLGANDELISFKDEGEQEEKSSENSSAERDLADVKSSLVNESGPALHELMREAEISLLECKVCFEKFGHRQQRRPRNLSCGHVVCLACVAALAHPRTLALECPFCRRACRGCDTSDCLPVLHLIELLGSALR

SEQ ID NO: 2400 - protein, 157 aa, synthetic construct
  source 1..157: note = HA-mycNLS-TCF4.9-NHLRC1.2
MGYPYDVPDYAPAAKRVKLDGSGSGSDDLGANDELISFKDEGEQEEKSSENSSAERDLADVKSSLVNGPALHELMREAEISLLECKVCFEKFGHRQQRRPRNLSCGHVVCLACVAALAHPRTLALECPFCRRACRGCDTSDCLPVLHLIELLGSALR

SEQ ID NO: 2401 - protein, 158 aa, synthetic construct
  source 1..158: note = HA-mycNLS-TCF4.2-(GS)1-NHLRC1.1
MGYPYDVPDYAPAAKRVKLDGSGSGSDDLGANDELISFKDEGEQEEAERDLADVKSSLVNESETGSESGPALHELMREAEISLLECKVCFEKFGHRQQRRPRNLSCGHVVCLACVAALAHPRTLALECPFCRRACRGCDTSDCLPVLHLIELLGSALR

SEQ ID NO: 2402 - protein, 165 aa, synthetic construct
  source 1..165: note = HA-mycNLS-TCF4.3-(GS)1-NHLRC1.1
MGYPYDVPDYAPAAKRVKLDGSGSGSDDLGANDELISFKDEGEQEEKSSENSSAERDLADVRSSLVNESETGSESGPALHELMREAEISLLECKVCFEKFGHRQQRRPRNLSCGHVVCLACVAALAHPRTLALECPFCRRACRGCDTSDCLPVLHLIELLGSALR

SEQ ID NO: 2403 - protein, 158 aa, synthetic construct
  source 1..158: note = HA-mycNLS-TCF4.4-(GS)1-NHLRC1.1
MGYPYDVPDYAPAAKRVKLDGSGSGSDDLGANDELISFKDEGEQEEAERDLADVRSSLVNESETGSESGPALHELMREAEISLLECKVCFEKFGHRQQRRPRNLSCGHVVCLACVAALAHPRTLALECPFCRRACRGCDTSDCLPVLHLIELLGSALR

SEQ ID NO: 2404 - protein, 165 aa, synthetic construct
  source 1..165: note = HA-mycNLS-TCF4.5-(GS)1-NHLRC1.1
MGYPYDVPDYAPAAKRVKLDGSGSGSDDLGANDELISFRDEGEQEERSSENSSAERDLADVKSSLVNESETGSESGPALHELMREAEISLLECKVCFEKFGHRQQRRPRNLSCGHVVCLACVAALAHPRTLALECPFCRRACRGCDTSDCLPVLHLIELLGSALR

SEQ ID NO: 2405 - protein, 158 aa, synthetic construct
  source 1..158: note = HA-mycNLS-TCF4.6-(GS)1-NHLRC1.1
MGYPYDVPDYAPAAKRVKLDGSGSGSDDLGANDELISFRDEGEQEEAERDLADVKSSLVNESETGSESGPALHELMREAEISLLECKVCFEKFGHRQQRRPRNLSCGHVVCLACVAALAHPRTLALECPFCRRACRGCDTSDCLPVLHLIELLGSALR

SEQ ID NO: 2406 - protein, 165 aa, synthetic construct
  source 1..165: note = HA-mycNLS-TCF4.7-(GS)1-NHLRC1.1
MGYPYDVPDYAPAAKRVKLDGSGSGSDDLGANDELISFRDEGEQEERSSENSSAERDLADVRSSLVNESETGSESGPALHELMREAEISLLECKVCFEKFGHRQQRRPRNLSCGHVVCLACVAALAHPRTLALECPFCRRACRGCDTSDCLPVLHLIELLGSALR

SEQ ID NO: 2407 - protein, 158 aa, synthetic construct
  source 1..158: note = HA-mycNLS-TCF4.8-(GS)1-NHLRC1.1
MGYPYDVPDYAPAAKRVKLDGSGSGSDDLGANDELISFRDEGEQEEAERDLADVRSSLVNESETGSESGPALHELMREAEISLLECKVCFEKFGHRQQRRPRNLSCGHVVCLACVAALAHPRTLALECPFCRRACRGCDTSDCLPVLHLIELLGSALR

SEQ ID NO: 2408 - protein, 161 aa, synthetic construct
  source 1..161: note = HA-mycNLS-TCF4.9-(GS)1-NHLRC1.1
MGYPYDVPDYAPAAKRVKLDGSGSGSDDLGANDELISFKDEGEQEEKSSENSSAERDLADVKSSLVNGSESGPALHELMREAEISLLECKVCFEKFGHRQQRRPRNLSCGHVVCLACVAALAHPRTLALECPFCRRACRGCDTSDCLPVLHLIELLGSALR

SEQ ID NO: 2409 - protein, 157 aa, synthetic construct
  source 1..157: note = HA-mycNLS-TCF4.2-(GS)1-NHLRC1.1
MYPYDVPDYAPAAKRVKLDGSGSGSDDLGANDELISFKDEGEQEEAERDLADVKSSLVNESETGSESGPALHELMREAEISLLECKVCFEKFGHRQQRRPRNLSCGHVVCLACVAALAHPRTLALECPFCRRACRGCDTSDCLPVLHLIELLGSALR

SEQ ID NO: 2410 - protein, 157 aa, synthetic construct
  source 1..157: note = HA-mycNLS-TCF4.6-(GS)1-NHLRC1.1
MYPYDVPDYAPAAKRVKLDGSGSGSDDLGANDELISFRDEGEQEEAERDLADVKSSLVNESETGSESGPALHELMREAEISLLECKVCFEKFGHRQQRRPRNLSCGHVVCLACVAALAHPRTLALECPFCRRACRGCDTSDCLPVLHLIELLGSALR

SEQ ID NO: 2411 - protein, 168 aa, synthetic construct
  source 1..168: note = HA-mycNLS-TCF4.2-(GS)6-NHLRC1.1
MGYPYDVPDYAPAAKRVKLDGSGSGSDDLGANDELISFKDEGEQEEAERDLADVKSSLVNESETGSGSGSGSGSGSESGPALHELMREAEISLLECKVCFEKFGHRQQRRPRNLSCGHVVCLACVAALAHPRTLALECPFCRRACRGCDTSDCLPVLHLIELLGSALR

SEQ ID NO: 2412 - protein, 168 aa, synthetic construct
  source 1..168: note = HA-mycNLS-TCF4.6-(GS)6-NHLRC1.1
MGYPYDVPDYAPAAKRVKLDGSGSGSDDLGANDELISFRDEGEQEEAERDLADVKSSLVNESETGSGSGSGSGSGSESGPALHELMREAEISLLECKVCFEKFGHRQQRRPRNLSCGHVVCLACVAALAHPRTLALECPFCRRACRGCDTSDCLPVLHLIELLGSALR

SEQ ID NO: 2413 - protein, 167 aa, synthetic construct
  source 1..167: note = HA-mycNLS-TCF4.11-(GS)6-NHLRC1.1
MGYPYDVPDYAPAAKRVKLDGSGSGSDDLGANDELISFRDEGEQEAERDLADVKSSLVNESETGSGSGSGSGSGSESGPALHELMREAEISLLECKVCFEKFGHRQQRRPRNLSCGHVVCLACVAALAHPRTLALECPFCRRACRGCDTSDCLPVLHLIELLGSALR

SEQ ID NO: 2414 - protein, 200 aa, synthetic construct
  source 1..200: note = HA-mycNLS-TCF4.2-(GS)6-NHLRC1.1-hrpNLS
MGYPYDVPDYAPAAKRVKLDGSGSGSDDLGANDELISFKDEGEQEEAERDLADVKSSLVNESETGSGSGSGSGSGSESGPALHELMREAEISLLECKVCFEKFGHRQQRRPRNLSCGHVVCLACVAALAHPRTLALECPFCRRACRGCDTSDCLPVLHLIELLGSALRGGGSGRSGGNHRRNGRGGRGGYNRRNNGYHPY

SEQ ID NO: 2415 - protein, 164 aa, synthetic construct
  source 1..164: note = HA-mycNLS-TCF4.10-(GS)6-NHLRC1.1
MGYPYDVPDYAPAAKRVKLDGSGSGSDDLGANDELISFRDEGEQEEAERDLADVRSSLVNGSGSGSGSGSGSESGPALHELMREAEISLLECKVCFEKFGHRQQRRPRNLSCGHVVCLACVAALAHPRTLALECPFCRRACRGCDTSDCLPVLHLIELLGSALR

SEQ ID NO: 2416 - protein, 164 aa, synthetic construct
  source 1..164: note = HA-mycNLS-TCF4.12-(GS)6-NHLRC1.1
MGYPYDVPDYAPAAKRVKLDGSGSGSDDLGANDELISFKDEGEQEEAERDLADVKSSLVNGSGSGSGSGSGSESGPALHELMREAEISLLECKVCFEKFGHRQQRRPRNLSCGHVVCLACVAALAHPRTLALECPFCRRACRGCDTSDCLPVLHLIELLGSALR

SEQ ID NO: 2417 - protein, 159 aa, synthetic construct
  source 1..159: note = HA-TCF4.2-(GS)6-NHLRC1.1
MGYPYDVPDYAGSGSGSDDLGANDELISFKDEGEQEEAERDLADVKSSLVNESETGSGSGSGSGSGSESGPALHELMREAEISLLECKVCFEKFGHRQQRRPRNLSCGHVVCLACVAALAHPRTLALECPFCRRACRGCDTSDCLPVLHLIELLGSALR

SEQ ID NO: 2418 - protein, 167 aa, synthetic construct
  source 1..167: note = HA-mycNLS-TCF4.13-(GS)6-NHLRC1.1
MGYPYDVPDYAPAAKRVKLDGSGSGSDDLGANDELISFKDEGEQEAERDLADVKSSLVNESETGSGSGSGSGSGSESGPALHELMREAEISLLECKVCFEKFGHRQQRRPRNLSCGHVVCLACVAALAHPRTLALECPFCRRACRGCDTSDCLPVLHLIELLGSALR

SEQ ID NO: 2419 - protein, 154 aa, synthetic construct
  source 1..154: note = HA-mycNLS-TCF4.12-(GS)1-NHLRC1.1
MGYPYDVPDYAPAAKRVKLDGSGSGSDDLGANDELISFKDEGEQEEAERDLADVKSSLVNGSESGPALHELMREAEISLLECKVCFEKFGHRQQRRPRNLSCGHVVCLACVAALAHPRTLALECPFCRRACRGCDTSDCLPVLHLIELLGSALR

SEQ ID NO: 2420 - protein, 156 aa, synthetic construct
  source 1..156: note = HA-mycNLS-TCF4.2-NHLRC1.1
MGYPYDVPDYAPAAKRVKLDGSGSGSDDLGANDELISFKDEGEQEEAERDLADVKSSLVNESETESGPALHELMREAEISLLECKVCFEKFGHRQQRRPRNLSCGHVVCLACVAALAHPRTLALECPFCRRACRGCDTSDCLPVLHLIELLGSALR

SEQ ID NO: 2421 - protein, 154 aa, synthetic construct
  source 1..154: note = HA-mycNLS-TCF4.2-NHLRC1.2
MGYPYDVPDYAPAAKRVKLDGSGSGSDDLGANDELISFKDEGEQEEAERDLADVKSSLVNESETGPALHELMREAEISLLECKVCFEKFGHRQQRRPRNLSCGHVVCLACVAALAHPRTLALECPFCRRACRGCDTSDCLPVLHLIELLGSALR

SEQ ID NO: 2422 - protein, 152 aa, synthetic construct
  source 1..152: note = HA-mycNLS-TCF4.12-NHLRC1.1
MGYPYDVPDYAPAAKRVKLDGSGSGSDDLGANDELISFKDEGEQEEAERDLADVKSSLVNESGPALHELMREAEISLLECKVCFEKFGHRQQRRPRNLSCGHVVCLACVAALAHPRTLALECPFCRRACRGCDTSDCLPVLHLIELLGSALR

SEQ ID NO: 2423 - protein, 150 aa, synthetic construct
  source 1..150: note = HA-mycNLS-TCF4.12-NHLRC1.2
MGYPYDVPDYAPAAKRVKLDGSGSGSDDLGANDELISFKDEGEQEEAERDLADVKSSLVNGPALHELMREAEISLLECKVCFEKFGHRQQRRPRNLSCGHVVCLACVAALAHPRTLALECPFCRRACRGCDTSDCLPVLHLIELLGSALR

SEQ ID NO: 2424 - protein, 152 aa, synthetic construct
  source 1..152: note = HA-mycNLS-TCF4.12-(GS)1-NHLRC1.2
MGYPYDVPDYAPAAKRVKLDGSGSGSDDLGANDELISFKDEGEQEEAERDLADVKSSLVNGSGPALHELMREAEISLLECKVCFEKFGHRQQRRPRNLSCGHVVCLACVAALAHPRTLALECPFCRRACRGCDTSDCLPVLHLIELLGSALR

SEQ ID NO: 2425 - protein, 159 aa, synthetic construct
  source 1..159: note = mycNLS-TCF4.2-(GS)6-NHLRC1.1
MGPAAKRVKLDGSGSGSDDLGANDELISFKDEGEQEEAERDLADVKSSLVNESETGSGSGSGSGSGSESGPALHELMREAEISLLECKVCFEKFGHRQQRRPRNLSCGHVVCLACVAALAHPRTLALECPFCRRACRGCDTSDCLPVLHLIELLGSALR

SEQ ID NO: 2426 - protein, 178 aa, synthetic construct
  source 1..178: note = HA-mycNLS-TCF4.2-(GS)6-NHLRC1.1-spNLS.2
MGYPYDVPDYAPAAKRVKLDGSGSGSDDLGANDELISFKDEGEQEEAERDLADVKSSLVNESETGSGSGSGSGSGSESGPALHELMREAEISLLECKVCFEKFGHRQQRRPRNLSCGHVVCLACVAALAHPRTLALECPFCRRACRGCDTSDCLPVLHLIELLGSALRGPPRKRLKQS

SEQ ID NO: 2427 - protein, 174 aa, synthetic construct
  source 1..174: note = N1-HA-mycNLS-TCF4.2-(GS)6-NHLRC1.1
MGAAEASEYPYDVPDYAPAAKRVKLDGSGSGSDDLGANDELISFKDEGEQEEAERDLADVKSSLVNESETGSGSGSGSGSGSESGPALHELMREAEISLLECKVCFEKFGHRQQRRPRNLSCGHVVCLACVAALAHPRTLALECPFCRRACRGCDTSDCLPVLHLIELLGSALR

SEQ ID NO: 2428 - protein, 173 aa, synthetic construct
  source 1..173: note = N2-HA-mycNLS-TCF4.2-(GS)6-NHLRC1.1
MGEEEIAYPYDVPDYAPAAKRVKLDGSGSGSDDLGANDELISFKDEGEQEEAERDLADVKSSLVNESETGSGSGSGSGSGSESGPALHELMREAEISLLECKVCFEKFGHRQQRRPRNLSCGHVVCLACVAALAHPRTLALECPFCRRACRGCDTSDCLPVLHLIELLGSALR

SEQ ID NO: 2429 - protein, 175 aa, synthetic construct
  source 1..175: note = N3-HA-mycNLS-TCF4.2-(GS)6-NHLRC1.1
MGAAEEEDEYPYDVPDYAPAAKRVKLDGSGSGSDDLGANDELISFKDEGEQEEAERDLADVKSSLVNESETGSGSGSGSGSGSESGPALHELMREAEISLLECKVCFEKFGHRQQRRPRNLSCGHVVCLACVAALAHPRTLALECPFCRRACRGCDTSDCLPVLHLIELLGSALR

SEQ ID NO: 2430 - protein, 162 aa, synthetic construct
  source 1..162: note = HA-mycNLS-d-TCF4.2-(GS)6-NHLRC1.1
MGYPYDVPDYAPAAKRVKLDDDLGANDELISFKDEGEQEEAERDLADVKSSLVNESETGSGSGSGSGSGSESGPALHELMREAEISLLECKVCFEKFGHRQQRRPRNLSCGHVVCLACVAALAHPRTLALECPFCRRACRGCDTSDCLPVLHLIELLGSALR

SEQ ID NO: 2431 - protein, 168 aa, synthetic construct
  source 1..168: note = HA-mycNLS-TCF4.2-(GGGS)3-NHLRC1.1
MGYPYDVPDYAPAAKRVKLDGSGSGSDDLGANDELISFKDEGEQEEAERDLADVKSSLVNESETGGGSGGGSGGGSESGPALHELMREAEISLLECKVCFEKFGHRQQRRPRNLSCGHVVCLACVAALAHPRTLALECPFCRRACRGCDTSDCLPVLHLIELLGSALR

SEQ ID NO: 2432 - protein, 164 aa, synthetic construct
  source 1..164: note = HA-mycNLS-TCF4.2-(GGGS)2-NHLRC1.1
MGYPYDVPDYAPAAKRVKLDGSGSGSDDLGANDELISFKDEGEQEEAERDLADVKSSLVNESETGGGSGGGSESGPALHELMREAEISLLECKVCFEKFGHRQQRRPRNLSCGHVVCLACVAALAHPRTLALECPFCRRACRGCDTSDCLPVLHLIELLGSALR

SEQ ID NO: 2433 - protein, 160 aa, synthetic construct
  source 1..160: note = HA-mycNLS-TCF4.2-GGGS-NHLRC1.1
MGYPYDVPDYAPAAKRVKLDGSGSGSDDLGANDELISFKDEGEQEEAERDLADVKSSLVNESETGGGSESGPALHELMREAEISLLECKVCFEKFGHRQQRRPRNLSCGHVVCLACVAALAHPRTLALECPFCRRACRGCDTSDCLPVLHLIELLGSALR

SEQ ID NO: 2434 - protein, 164 aa, synthetic construct
  source 1..164: note = HA-mycNLS-TCF4.12-(GGGS)3-NHLRC1.1
MGYPYDVPDYAPAAKRVKLDGSGSGSDDLGANDELISFKDEGEQEEAERDLADVKSSLVNGGGSGGGSGGGSESGPALHELMREAEISLLECKVCFEKFGHRQQRRPRNLSCGHVVCLACVAALAHPRTLALECPFCRRACRGCDTSDCLPVLHLIELLGSALR

SEQ ID NO: 2435 - protein, 160 aa, synthetic construct
  source 1..160: note = HA-mycNLS-TCF4.12-(GGGS)2-NHLRC1.1
MGYPYDVPDYAPAAKRVKLDGSGSGSDDLGANDELISFKDEGEQEEAERDLADVKSSLVNGGGSGGGSESGPALHELMREAEISLLECKVCFEKFGHRQQRRPRNLSCGHVVCLACVAALAHPRTLALECPFCRRACRGCDTSDCLPVLHLIELLGSALR

SEQ ID NO: 2436 - protein, 156 aa, synthetic construct
  source 1..156: note = HA-mycNLS-TCF4.12-GGGS-NHLRC1.1
MGYPYDVPDYAPAAKRVKLDGSGSGSDDLGANDELISFKDEGEQEEAERDLADVKSSLVNGGGSESGPALHELMREAEISLLECKVCFEKFGHRQQRRPRNLSCGHVVCLACVAALAHPRTLALECPFCRRACRGCDTSDCLPVLHLIELLGSALR

SEQ ID NO: 2437 - protein, 163 aa, synthetic construct
  source 1..163: note = HA-mycNLS-TCF4.15-(GGGS)3-NHLRC1.1
MGYPYDVPDYAPAAKRVKLDGSGSGSDDLGANDELISFKDEGEQEAERDLADVKSSLVNGGGSGGGSGGGSESGPALHELMREAEISLLECKVCFEKFGHRQQRRPRNLSCGHVVCLACVAALAHPRTLALECPFCRRACRGCDTSDCLPVLHLIELLGSALR

SEQ ID NO: 2438 - protein, 159 aa, synthetic construct
  source 1..159: note = HA-mycNLS-TCF4.15-(GGGS)2-NHLRC1.1
MGYPYDVPDYAPAAKRVKLDGSGSGSDDLGANDELISFKDEGEQEAERDLADVKSSLVNGGGSGGGSESGPALHELMREAEISLLECKVCFEKFGHRQQRRPRNLSCGHVVCLACVAALAHPRTLALECPFCRRACRGCDTSDCLPVLHLIELLGSALR

SEQ ID NO: 2439 - protein, 155 aa, synthetic construct
  source 1..155: note = HA-mycNLS-TCF4.15-GGGS-NHLRC1.1
MGYPYDVPDYAPAAKRVKLDGSGSGSDDLGANDELISFKDEGEQEAERDLADVKSSLVNGGGSESGPALHELMREAEISLLECKVCFEKFGHRQQRRPRNLSCGHVVCLACVAALAHPRTLALECPFCRRACRGCDTSDCLPVLHLIELLGSALR

SEQ ID NO: 2440 - protein, 151 aa, synthetic construct
  source 1..151: note = HA-mycNLS-TCF4.15-NHLRC1.1
MGYPYDVPDYAPAAKRVKLDGSGSGSDDLGANDELISFKDEGEQEAERDLADVKSSLVNESGPALHELMREAEISLLECKVCFEKFGHRQQRRPRNLSCGHVVCLACVAALAHPRTLALECPFCRRACRGCDTSDCLPVLHLIELLGSALR

SEQ ID NO: 2441 - protein, 149 aa, synthetic construct
  source 1..149: note = HA-mycNLS-TCF4.15-NHLRC1.2
MGYPYDVPDYAPAAKRVKLDGSGSGSDDLGANDELISFKDEGEQEAERDLADVKSSLVNGPALHELMREAEISLLECKVCFEKFGHRQQRRPRNLSCGHVVCLACVAALAHPRTLALECPFCRRACRGCDTSDCLPVLHLIELLGSALR

SEQ ID NO: 2442 - protein, 156 aa, synthetic construct
  source 1..156: note = HA-mycNLS-TCF4.2-(GS)1-NHLRC1.2
MGYPYDVPDYAPAAKRVKLDGSGSGSDDLGANDELISFKDEGEQEEAERDLADVKSSLVNESETGSGPALHELMREAEISLLECKVCFEKFGHRQQRRPRNLSCGHVVCLACVAALAHPRTLALECPFCRRACRGCDTSDCLPVLHLIELLGSALR

SEQ ID NO: 2443 - protein, 151 aa, synthetic construct
  source 1..151: note = HA-mycNLS-TCF4.15-(GS)1-NHLRC1.2
MGYPYDVPDYAPAAKRVKLDGSGSGSDDLGANDELISFKDEGEQEAERDLADVKSSLVNGSGPALHELMREAEISLLECKVCFEKFGHRQQRRPRNLSCGHVVCLACVAALAHPRTLALECPFCRRACRGCDTSDCLPVLHLIELLGSALR

SEQ ID NO: 2444 - protein, 169 aa, synthetic construct
  source 1..169: note = HA-TCF4.2-(GS)6-NHLRC1.1-spNLS.2
MGYPYDVPDYAGSGSGSDDLGANDELISFKDEGEQEEAERDLADVKSSLVNESETGSGSGSGSGSGSESGPALHELMREAEISLLECKVCFEKFGHRQQRRPRNLSCGHVVCLACVAALAHPRTLALECPFCRRACRGCDTSDCLPVLHLIELLGSALRGPPRKRLKQS

SEQ ID NO: 2445 - protein, 172 aa, synthetic construct
  source 1..172: note = mycNLS-TCF4.2-(GS)6-NHLRC1.1-HA
MGPAAKRVKLDGSGSGSDDLGANDELISFKDEGEQEEAERDLADVKSSLVNESETGSGSGSGSGSGSESGPALHELMREAEISLLECKVCFEKFGHRQQRRPRNLSCGHVVCLACVAALAHPRTLALECPFCRRACRGCDTSDCLPVLHLIELLGSALRGGGSYPYDVPDYA

SEQ ID NO: 2446 - protein, 136 aa, synthetic construct
  source 1..136: note = HA-mycNLS-TCF4.2-(GS)6-RNF4.1
MYPYDVPDYAPAAKRVKLDGSGSGSDDLGANDELISFKDEGEQEEAERDLADVKSSLVNESETGSGSGSGSGSGSVSCPICMDGYSEIVQNGRLIVSTECGHVFCSQCLRDSLKNANTCPTCRKKINHKRYHPIYI

SEQ ID NO: 2447 - protein, 153 aa, synthetic construct
  source 1..153: note = HA-mycNLS-TCF4.2-(GS)6-RNF12.2
MYPYDVPDYAPAAKRVKLDGSGSGSDDLGANDELISFKDEGEQEEAERDLADVKSSLVNESETGSGSGSGSGSGSGLTKEQIDNLAMRSFGENDALKTCSVCITEYTEGNKLRKLPCSHEYHVHCIDRWLSENSTCPICRRAVLASGNRESVV

SEQ ID NO: 2448 - protein, 175 aa, synthetic construct; identical to SEQ ID NO: 2396
  source 1..175: note = HA-mycNLS-TCF4.1-(GS)6-NHLRC1.1

SEQ ID NO: 2449 - protein, 175 aa, synthetic construct
  source 1..175: note = HA-mycNLS-TCF4.3-(GS)6-NHLRC1.1
MGYPYDVPDYAPAAKRVKLDGSGSGSDDLGANDELISFKDEGEQEEKSSENSSAERDLADVRSSLVNESETGSGSGSGSGSGSESGPALHELMREAEISLLECKVCFEKFGHRQQRRPRNLSCGHVVCLACVAALAHPRTLALECPFCRRACRGCDTSDCLPVLHLIELLGSALR

SEQ ID NO: 2450 - protein, 168 aa, synthetic construct; identical to SEQ ID NO: 2412
  source 1..168: note = HA-mycNLS-TCF4.6-(GS)6-NHLRC1.1

SEQ ID NO: 2451 - protein, 175 aa, synthetic construct
  source 1..175: note = HA-mycNLS-TCF4.7-(GS)6-NHLRC1.1
MGYPYDVPDYAPAAKRVKLDGSGSGSDDLGANDELISFRDEGEQEERSSENSSAERDLADVRSSLVNESETGSGSGSGSGSGSESGPALHELMREAEISLLECKVCFEKFGHRQQRRPRNLSCGHVVCLACVAALAHPRTLALECPFCRRACRGCDTSDCLPVLHLIELLGSALR

SEQ ID NO: 2452 - protein, 174 aa, synthetic construct
  source 1..174: note = HA-TCF4.2-(GS)6-NHLRC1.1-mycNLS
MGYPYDVPDYAGSGSGSDDLGANDELISFKDEGEQEEAERDLADVKSSLVNESETGSGSGSGSGSGSESGPALHELMREAEISLLECKVCFEKFGHRQQRRPRNLSCGHVVCLACVAALAHPRTLALECPFCRRACRGCDTSDCLPVLHLIELLGSALRGSGSGSPAAKRVKLD

SEQ ID NO: 2453 - protein, 185 aa, synthetic construct
  source 1..185: note = HA-TCF4.2-(GS)6-NHLRC1.1-nlpNLS
MGYPYDVPDYAGSGSGSDDLGANDELISFKDEGEQEEAERDLADVKSSLVNESETGSGSGSGSGSGSESGPALHELMREAEISLLECKVCFEKFGHRQQRRPRNLSCGHVVCLACVAALAHPRTLALECPFCRRACRGCDTSDCLPVLHLIELLGSALRGSGSGSAVKRPAATKKAGQAKKKKLD

SEQ ID NO: 2454 - protein, 192 aa, synthetic construct
  source 1..192: note = HA-TCF4.2-(GS)6-NHLRC1.1-hrpNLS
MGYPYDVPDYAGSGSGSDDLGANDELISFKDEGEQEEAERDLADVKSSLVNESETGSGSGSGSGSGSESGPALHELMREAEISLLECKVCFEKFGHRQQRRPRNLSCGHVVCLACVAALAHPRTLALECPFCRRACRGCDTSDCLPVLHLIELLGSALRGSGSGSRSGGNHRRNGRGGRGGYNRRNNGYHPY

SEQ ID NO: 2455 - protein, 169 aa, synthetic construct
  source 1..169: note = HA-spNLS.2-TCF4.2-(GS)6-NHLRC1.1
MGYPYDVPDYAGPPRKRLKQSGSGSGSDDLGANDELISFKDEGEQEEAERDLADVKSSLVNESETGSGSGSGSGSGSESGPALHELMREAEISLLECKVCFEKFGHRQQRRPRNLSCGHVVCLACVAALAHPRTLALECPFCRRACRGCDTSDCLPVLHLIELLGSALR

SEQ ID NO: 2456 - protein, 179 aa, synthetic construct
  source 1..179: note = HA-nlpNLS-TCF4.2-(GS)6-NHLRC1.1
MGYPYDVPDYAAVKRPAATKKAGQAKKKKLDGSGSGSDDLGANDELISFKDEGEQEEAERDLADVKSSLVNESETGSGSGSGSGSGSESGPALHELMREAEISLLECKVCFEKFGHRQQRRPRNLSCGHVVCLACVAALAHPRTLALECPFCRRACRGCDTSDCLPVLHLIELLGSALR

SEQ ID NO: 2457 - protein, 186 aa, synthetic construct
  source 1..186: note = HA-hrpNLS-TCF4.2-(GS)6-NHLRC1.1
MGYPYDVPDYARSGGNHRRNGRGGRGGYNRRNNGYHPYGSGSGSDDLGANDELISFKDEGEQEEAERDLADVKSSLVNESETGSGSGSGSGSGSESGPALHELMREAEISLLECKVCFEKFGHRQQRRPRNLSCGHVVCLACVAALAHPRTLALECPFCRRACRGCDTSDCLPVLHLIELLGSALR

SEQ ID NO: 2458 - protein, 156 aa, synthetic construct
  source 1..156: note = HA-mycNLS-TCF4.6-NHLRC1.1
MGYPYDVPDYAPAAKRVKLDGSGSGSDDLGANDELISFRDEGEQEEAERDLADVKSSLVNESETESGPALHELMREAEISLLECKVCFEKFGHRQQRRPRNLSCGHVVCLACVAALAHPRTLALECPFCRRACRGCDTSDCLPVLHLIELLGSALR

SEQ ID NO: 2459 - protein, 164 aa, synthetic construct
  source 1..164: note = HA-mycNLS-TCF4.16-(GS)6-NHLRC1.1
MGYPYDVPDYAPAAKRVKLDGSGSGSDDLGANDELISFRDEGEQEEAERDLADVKSSLVNGSGSGSGSGSGSESGPALHELMREAEISLLECKVCFEKFGHRQQRRPRNLSCGHVVCLACVAALAHPRTLALECPFCRRACRGCDTSDCLPVLHLIELLGSALR

SEQ ID NO: 2460 - protein, 169 aa, synthetic construct
  source 1..169: note = HA-TCF4.6-(GS)6-NHLRC1.1-spNLS.2
MGYPYDVPDYAGSGSGSDDLGANDELISFRDEGEQEEAERDLADVKSSLVNESETGSGSGSGSGSGSESGPALHELMREAEISLLECKVCFEKFGHRQQRRPRNLSCGHVVCLACVAALAHPRTLALECPFCRRACRGCDTSDCLPVLHLIELLGSALRGPPRKRLKQS

SEQ ID NO: 2461 - protein, 157 aa, synthetic construct
  source 1..157: note = HA-TCF4.6-NHLRC1.1-spNLS.2
MGYPYDVPDYAGSGSGSDDLGANDELISFRDEGEQEEAERDLADVKSSLVNESETESGPALHELMREAEISLLECKVCFEKFGHRQQRRPRNLSCGHVVCLACVAALAHPRTLALECPFCRRACRGCDTSDCLPVLHLIELLGSALRGPPRKRLKQS

SEQ ID NO: 2462 - protein, 165 aa, synthetic construct
  source 1..165: note = HA-TCF4.12-(GS)6-NHLRC1.1-spNLS.2
MGYPYDVPDYAGSGSGSDDLGANDELISFKDEGEQEEAERDLADVKSSLVNGSGSGSGSGSGSESGPALHELMREAEISLLECKVCFEKFGHRQQRRPRNLSCGHVVCLACVAALAHPRTLALECPFCRRACRGCDTSDCLPVLHLIELLGSALRGPPRKRLKQS

SEQ ID NO: 2463 - protein, 165 aa, synthetic construct
  source 1..165: note = HA-TCF4.16-(GS)6-NHLRC1.1-spNLS.2
MGYPYDVPDYAGSGSGSDDLGANDELISFRDEGEQEEAERDLADVKSSLVNGSGSGSGSGSGSESGPALHELMREAEISLLECKVCFEKFGHRQQRRPRNLSCGHVVCLACVAALAHPRTLALECPFCRRACRGCDTSDCLPVLHLIELLGSALRGPPRKRLKQS

SEQ ID NO: 2464 - protein, 159 aa, synthetic construct
  source 1..159: note = mycNLS-TCF4.6-(GS)6-NHLRC1.1
MGPAAKRVKLDGSGSGSDDLGANDELISFRDEGEQEEAERDLADVKSSLVNESETGSGSGSGSGSGSESGPALHELMREAEISLLECKVCFEKFGHRQQRRPRNLSCGHVVCLACVAALAHPRTLALECPFCRRACRGCDTSDCLPVLHLIELLGSALR

SEQ ID NO: 2465 - protein, 147 aa, synthetic construct
  source 1..147: note = mycNLS-TCF4.6-NHLRC1.1
MGPAAKRVKLDGSGSGSDDLGANDELISFRDEGEQEEAERDLADVKSSLVNESETESGPALHELMREAEISLLECKVCFEKFGHRQQRRPRNLSCGHVVCLACVAALAHPRTLALECPFCRRACRGCDTSDCLPVLHLIELLGSALR

SEQ ID NO: 2466 - protein, 155 aa, synthetic construct
  source 1..155: note = mycNLS-TCF4.12-(GS)6-NHLRC1.1
MGPAAKRVKLDGSGSGSDDLGANDELISFKDEGEQEEAERDLADVKSSLVNGSGSGSGSGSGSESGPALHELMREAEISLLECKVCFEKFGHRQQRRPRNLSCGHVVCLACVAALAHPRTLALECPFCRRACRGCDTSDCLPVLHLIELLGSALR

SEQ ID NO: 2467 - protein, 155 aa, synthetic construct
  source 1..155: note = mycNLS-TCF4.16-(GS)6-NHLRC1.1
MGPAAKRVKLDGSGSGSDDLGANDELISFRDEGEQEEAERDLADVKSSLVNGSGSGSGSGSGSESGPALHELMREAEISLLECKVCFEKFGHRQQRRPRNLSCGHVVCLACVAALAHPRTLALECPFCRRACRGCDTSDCLPVLHLIELLGSALR

SEQ ID NO: 2468 - protein, 154 aa, synthetic construct
  source 1..154: note = TCF4.6-(GS)6-NHLRC1.1-spNLS.2
MGDDLGANDELISFRDEGEQEEAERDLADVKSSLVNESETGSGSGSGSGSGSESGPALHELMREAEISLLECKVCFEKFGHRQQRRPRNLSCGHVVCLACVAALAHPRTLALECPFCRRACRGCDTSDCLPVLHLIELLGSALRGPPRKRLKQS

SEQ ID NO: 2469 - protein, 142 aa, synthetic construct
  source 1..142: note = TCF4.6-NHLRC1.1-spNLS.2
MGDDLGANDELISFRDEGEQEEAERDLADVKSSLVNESETESGPALHELMREAEISLLECKVCFEKFGHRQQRRPRNLSCGHVVCLACVAALAHPRTLALECPFCRRACRGCDTSDCLPVLHLIELLGSALRGPPRKRLKQS

SEQ ID NO: 2470 - protein, 150 aa, synthetic construct
  source 1..150: note = TCF4.12-(GS)6-NHLRC1.1-spNLS.2
MGDDLGANDELISFKDEGEQEEAERDLADVKSSLVNGSGSGSGSGSGSESGPALHELMREAEISLLECKVCFEKFGHRQQRRPRNLSCGHVVCLACVAALAHPRTLALECPFCRRACRGCDTSDCLPVLHLIELLGSALRGPPRKRLKQS

SEQ ID NO: 2471 - protein, 150 aa, synthetic construct
  source 1..150: note = TCF4.16-(GS)6-NHLRC1.1-spNLS.2
MGDDLGANDELISFRDEGEQEEAERDLADVKSSLVNGSGSGSGSGSGSESGPALHELMREAEISLLECKVCFEKFGHRQQRRPRNLSCGHVVCLACVAALAHPRTLALECPFCRRACRGCDTSDCLPVLHLIELLGSALRGPPRKRLKQS

SEQ ID NO: 2472 - protein, 548 aa, synthetic construct
  source 1..548: note = 3x(HA-mycNLS-TCF4.2-(GS)6-NHLRC1.1-P2A)
MGYPYDVPDYAPAAKRVKLDGSGSGSDDLGANDELISFKDEGEQEEAERDLADVKSSLVNESETGSGSGSGSGSGSESGPALHELMREAEISLLECKVCFEKFGHRQQRRPRNLSCGHVVCLACVAALAHPRTLALECPFCRRACRGCDTSDCLPVLHLIELLGSALRGSGATNFSLLKQAGDVEENPGPMGYPYDVPDYAPAAKRVKLDGSGSGSDDLGANDELISFKDEGEQEEAERDLADVKSSLVNESETGSGSGSGSGSGSESGPALHELMREAEISLLECKVCFEKFGHRQQRRPRNLSCGHVVCLACVAALAHPRTLALECPFCRRACRGCDTSDCLPVLHLIELLGSALRGSGATNFSLLKQAGDVEENPGPMGYPYDVPDYAPAAKRVKLDGSGSGSDDLGANDELISFKDEGEQEEAERDLADVKSSLVNESETGSGSGSGSGSGSESGPALHELMREAEISLLECKVCFEKFGHRQQRRPRNLSCGHVVCLACVAALAHPRTLALECPFCRRACRGCDTSDCLPVLHLIELLGSALR

SEQ ID NO: 2473 - protein, 546 aa, synthetic construct
  source 1..546: note = 3x(HA-mycNLS-TCF4.2-(GS)6-NHLRC1.1-T2A)
MGYPYDVPDYAPAAKRVKLDGSGSGSDDLGANDELISFKDEGEQEEAERDLADVKSSLVNESETGSGSGSGSGSGSESGPALHELMREAEISLLECKVCFEKFGHRQQRRPRNLSCGHVVCLACVAALAHPRTLALECPFCRRACRGCDTSDCLPVLHLIELLGSALRGSGEGRGSLLTCGDVEENPGPMGYPYDVPDYAPAAKRVKLDGSGSGSDDLGANDELISFKDEGEQEEAERDLADVKSSLVNESETGSGSGSGSGSGSESGPALHELMREAEISLLECKVCFEKFGHRQQRRPRNLSCGHVVCLACVAALAHPRTLALECPFCRRACRGCDTSDCLPVLHLIELLGSALRGSGEGRGSLLTCGDVEENPGPMGYPYDVPDYAPAAKRVKLDGSGSGSDDLGANDELISFKDEGEQEEAERDLADVKSSLVNESETGSGSGSGSGSGSESGPALHELMREAEISLLECKVCFEKFGHRQQRRPRNLSCGHVVCLACVAALAHPRTLALECPFCRRACRGCDTSDCLPVLHLIELLGSALR

SEQ ID NO: 2474 - protein, 168 aa, synthetic construct
  source 1..168: note = HA-mycNLS-TCF4.14-(GS)6-NHLRC1.1
MGYPYDVPDYAPAAKRVKLDGSGSGSDDLGANRELASAKDEGEQEEAERDAADVRSSAVNESETGSGSGSGSGSGSESGPALHELMREAEISLLECKVCFEKFGHRQQRRPRNLSCGHVVCLACVAALAHPRTLALECPFCRRACRGCDTSDCLPVLHLIELLGSALR

SEQ ID NO: 2475 - protein, 168 aa, synthetic construct
  source 1..168: note = HA-mycNLS-TCF4.2-(GS)6-NHLRC1.3
MGYPYDVPDYAPAAKRVKLDGSGSGSDDLGANDELISFKDEGEQEEAERDLADVKSSLVNESETGSGSGSGSGSGSESGPALHELMREAEISLLESKVCFEKFGHRQQRRPRNLSCGHVVCLACVAALAHPRTLALECPFCRRACRGCDTSDCLPVLHLIELLGSALR

SEQ ID NO: 2476 - protein, 288 aa, synthetic construct; identical to SEQ ID NO: 330
  source 1..288: note = FOXP3DBD-(GS)1-CHIP.1-mycNLS-HA

SEQ ID NO: 2477 - protein, 290 aa, synthetic construct; identical to SEQ ID NO: 331
  source 1..290: note = FOXP3DBD-(GS)2-CHIP.1-mycNLS-HA

SEQ ID NO: 2478 - protein, 292 aa, synthetic construct; identical to SEQ ID NO: 332
  source 1..292: note = FOXP3DBD-(GS)3-CHIP.1-mycNLS-HA

SEQ ID NO: 2479 - protein, 294 aa, synthetic construct; identical to SEQ ID NO: 333
  source 1..294: note = FOXP3DBD-(GS)4-CHIP.1-mycNLS-HA

SEQ ID NO: 2480 - protein, 296 aa, synthetic construct; identical to SEQ ID NO: 334
  source 1..296: note = FOXP3DBD-(GS)5-CHIP.1-mycNLS-HA

SEQ ID NO: 2481 - protein, 298 aa, synthetic construct; identical to SEQ ID NO: 335
  source 1..298: note = FOXP3DBD-(GS)6-CHIP.1-mycNLS-HA

SEQ ID NO: 2482 - protein, 149 aa, synthetic construct; identical to SEQ ID NO: 342
  source 1..149: note = HA-mycNLS-DCAF1.1-(GS)1-FOXP3DBD

SEQ ID NO: 2483 - protein, 151 aa, synthetic construct; identical to SEQ ID NO: 343
  source 1..151: note = HA-mycNLS-DCAF1.1-(GS)2-FOXP3DBD

SEQ ID NO: 2484 - protein, 153 aa, synthetic construct; identical to SEQ ID NO: 344
  source 1..153: note = HA-mycNLS-DCAF1.1-(GS)3-FOXP3DBD

SEQ ID NO: 2485 - protein, 155 aa, synthetic construct; identical to SEQ ID NO: 345
  source 1..155: note = HA-mycNLS-DCAF1.1-(GS)4-FOXP3DBD

SEQ ID NO: 2486 - protein, 157 aa, synthetic construct; identical to SEQ ID NO: 346
  source 1..157: note = HA-mycNLS-DCAF1.1-(GS)5-FOXP3DBD

SEQ ID NO: 2487 - protein, 159 aa, synthetic construct; identical to SEQ ID NO: 347
  source 1..159: note = HA-mycNLS-DCAF1.1-(GS)6-FOXP3DBD

SEQ ID NO: 2488 - protein, 470 aa, synthetic construct; identical to SEQ ID NO: 354
  source 1..470: note = HA-mycNLS-FOXP3DBD-(GS)1-E6AP.1

SEQ ID NO: 2489 - protein, 472 aa, synthetic construct; identical to SEQ ID NO: 355
  source 1..472: note = HA-mycNLS-FOXP3DBD-(GS)2-E6AP.1

SEQ ID NO: 2490 - protein, 474 aa, synthetic construct; identical to SEQ ID NO: 356
  source 1..474: note = HA-mycNLS-FOXP3DBD-(GS)3-E6AP.1

SEQ ID NO: 2491 - protein, 476 aa, synthetic construct; identical to SEQ ID NO: 357
  source 1..476: note = HA-mycNLS-FOXP3DBD-(GS)4-E6AP.1

SEQ ID NO: 2492 - protein, 478 aa, synthetic construct; identical to SEQ ID NO: 358
  source 1..478: note = HA-mycNLS-FOXP3DBD-(GS)5-E6AP.1

SEQ ID NO: 2493 - protein, 480 aa, synthetic construct; identical to SEQ ID NO: 359
  source 1..480: note = HA-mycNLS-FOXP3DBD-(GS)6-E6AP.1

SEQ ID NO: 2494 - protein, 466 aa, synthetic construct; identical to SEQ ID NO: 366
  source 1..466: note = HA-FBXW7a.1-(GS)1-FOXP3DBD

SEQ ID NO: 2495 - protein, 468 aa, synthetic construct; identical to SEQ ID NO: 367
  source 1..468: note = HA-FBXW7a.1-(GS)2-FOXP3DBD

SEQ ID NO: 2496 - protein, 470 aa, synthetic construct; identical to SEQ ID NO: 368
  source 1..470: note = HA-FBXW7a.1-(GS)3-FOXP3DBD

SEQ ID NO: 2497 - protein, 472 aa, synthetic construct; identical to SEQ ID NO: 369
  source 1..472: note = HA-FBXW7a.1-(GS)4-FOXP3DBD

SEQ ID NO: 2498 - protein, 474 aa, synthetic construct; identical to SEQ ID NO: 370
  source 1..474: note = HA-FBXW7a.1-(GS)5-FOXP3DBD

SEQ ID NO: 2499 - protein, 476 aa, synthetic construct; identical to SEQ ID NO: 371
  source 1..476: note = HA-FBXW7a.1-(GS)6-FOXP3DBD

SEQ ID NO: 2500 - protein, 435 aa, synthetic construct; identical to SEQ ID NO: 378
  source 1..435: note = HA-mycNLS-Keap1.1-(GS)1-FOXP3DBD

SEQ ID NO: 2501 - protein, 437 aa, synthetic construct; identical to SEQ ID NO: 379
  source 1..437: note = HA-mycNLS-Keap1.1-(GS)2-FOXP3DBD

SEQ ID NO: 2502 - protein, 439 aa, synthetic construct; identical to SEQ ID NO: 380
  source 1..439: note = HA-mycNLS-Keap1.1-(GS)3-FOXP3DBD

SEQ ID NO: 2503 - protein, 441 aa, synthetic construct; identical to SEQ ID NO: 381
  source 1..441: note = HA-mycNLS-Keap1.1-(GS)4-FOXP3DBD

SEQ ID NO: 2504 - protein, 443 aa, synthetic construct; identical to SEQ ID NO: 382
  source 1..443: note = HA-mycNLS-Keap1.1-(GS)5-FOXP3DBD

SEQ ID NO: 2505 - protein, 445 aa, synthetic construct; identical to SEQ ID NO: 383
  source 1..445: note = HA-mycNLS-Keap1.1-(GS)6-FOXP3DBD

SEQ ID NO: 2506 - protein, 241 aa, synthetic construct; identical to SEQ ID NO: 390
  source 1..241: note = HA-mycNLS-RNF125.1-(GS)1-FOXP3DBD

SEQ ID NO: 2507 - protein, 243 aa, synthetic construct; identical to SEQ ID NO: 391
  source 1..243: note = HA-mycNLS-RNF125.1-(GS)2-FOXP3DBD

SEQ ID NO: 2508 - protein, 245 aa, synthetic construct; identical to SEQ ID NO: 392
  source 1..245: note = HA-mycNLS-RNF125.1-(GS)3-FOXP3DBD

SEQ ID NO: 2509 - protein, 247 aa, synthetic construct; identical to SEQ ID NO: 393
  source 1..247: note = HA-mycNLS-RNF125.1-(GS)4-FOXP3DBD

SEQ ID NO: 2510 - protein, 249 aa, synthetic construct; identical to SEQ ID NO: 394
  source 1..249: note = HA-mycNLS-RNF125.1-(GS)5-FOXP3DBD

SEQ ID NO: 2511 - protein, 251 aa, synthetic construct; identical to SEQ ID NO: 395
  source 1..251: note = HA-mycNLS-RNF125.1-(GS)6-FOXP3DBD

SEQ ID NO: 2512 - protein, 340 aa, synthetic construct; identical to SEQ ID NO: 402
  source 1..340: note = FOXP3DBD-(GS)1-SPOP.1-mycNLS-HA

SEQ ID NO: 2513 - protein, 342 aa, synthetic construct; identical to SEQ ID NO: 403
  source 1..342: note = FOXP3DBD-(GS)2-SPOP.1-mycNLS-HA

SEQ ID NO: 2514 - protein, 344 aa, synthetic construct; identical to SEQ ID NO: 404
  source 1..344: note = FOXP3DBD-(GS)3-SPOP.1-mycNLS-HA

SEQ ID NO: 2515 - protein, 346 aa, synthetic construct; identical to SEQ ID NO: 405
  source 1..346: note = FOXP3DBD-(GS)4-SPOP.1-mycNLS-HA

SEQ ID NO: 2516 - protein, 349 aa, synthetic construct; identical to SEQ ID NO: 406
  source 1..349: note = FOXP3DBD-(GS)5-SPOP.1-mycNLS-HA

SEQ ID NO: 2517 - protein, 350 aa, synthetic construct; identical to SEQ ID NO: 407
  source 1..350: note = FOXP3DBD-(GS)6-SPOP.1-mycNLS-HA

SEQ ID NO: 2518 - protein, 154 aa, synthetic construct
  source 1..154: note = FOXP3DBD-(GS)1-VIF.1-mycNLS-HA
MRPPFTYATLIRWAILEAPEKQRTLNEIYHWFTRMFAFFRNHPATWKNAIRHNLSLHKCFVRVESEKGAVWTVDELEFRKKRSQRPSRGSSESAIRNTILGRIVSPRCEYQAGHNKVGSLQYLALAALIKPKGSGSPAAKRVKLDYPYDVPDYA

SEQ ID NO: 2519 - protein, 156 aa, synthetic construct
  source 1..156: note = FOXP3DBD-(GS)2-VIF.1-mycNLS-HA
MRPPFTYATLIRWAILEAPEKQRTLNEIYHWFTRMFAFFRNHPATWKNAIRHNLSLHKCFVRVESEKGAVWTVDELEFRKKRSQRPSRGSGSSESAIRNTILGRIVSPRCEYQAGHNKVGSLQYLALAALIKPKGSGSPAAKRVKLDYPYDVPDYA

SEQ ID NO: 2520 - protein, 158 aa, synthetic construct
  source 1..158: note = FOXP3DBD-(GS)3-VIF.1-mycNLS-HA
MRPPFTYATLIRWAILEAPEKQRTLNEIYHWFTRMFAFFRNHPATWKNAIRHNLSLHKCFVRVESEKGAVWTVDELEFRKKRSQRPSRGSGSGSSESAIRNTILGRIVSPRCEYQAGHNKVGSLQYLALAALIKPKGSGSPAAKRVKLDYPYDVPDYA

SEQ ID NO: 2521 - protein, 160 aa, synthetic construct
  source 1..160: note = FOXP3DBD-(GS)4-VIF.1-mycNLS-HA
MRPPFTYATLIRWAILEAPEKQRTLNEIYHWFTRMFAFFRNHPATWKNAIRHNLSLHKCFVRVESEKGAVWTVDELEFRKKRSQRPSRGSGSGSGSSESAIRNTILGRIVSPRCEYQAGHNKVGSLQYLALAALIKPKGSGSPAAKRVKLDYPYDVPDYA

SEQ ID NO: 2522 - protein, 162 aa, synthetic construct
  source 1..162: note = FOXP3DBD-(GS)5-VIF.1-mycNLS-HA
MRPPFTYATLIRWAILEAPEKQRTLNEIYHWFTRMFAFFRNHPATWKNAIRHNLSLHKCFVRVESEKGAVWTVDELEFRKKRSQRPSRGSGSGSGSGSSESAIRNTILGRIVSPRCEYQAGHNKVGSLQYLALAALIKPKGSGSPAAKRVKLDYPYDVPDYA

SEQ ID NO: 2523 - protein, 164 aa, synthetic construct
  source 1..164: note = FOXP3DBD-(GS)6-VIF.1-mycNLS-HA
MRPPFTYATLIRWAILEAPEKQRTLNEIYHWFTRMFAFFRNHPATWKNAIRHNLSLHKCFVRVESEKGAVWTVDELEFRKKRSQRPSRGSGSGSGSGSGSSESAIRNTILGRIVSPRCEYQAGHNKVGSLQYLALAALIKPKGSGSPAAKRVKLDYPYDVPDYA

SEQ ID NO: 2524 - protein, 315 aa, synthetic construct; identical to SEQ ID NO: 414
  source 1..315: note = VL12.3-(GS)1-CHIP.1-mycNLS-HA

SEQ ID NO: 2525 - protein, 317 aa, synthetic construct; identical to SEQ ID NO: 415
  source 1..317: note = VL12.3-(GS)2-CHIP.1-mycNLS-HA

SEQ ID NO: 2526 - protein, 319 aa, synthetic construct; identical to SEQ ID NO: 416
  source 1..319: note = VL12.3-(GS)3-CHIP.1-mycNLS-HA

SEQ ID NO: 2527 - protein, 321 aa, synthetic construct; identical to SEQ ID NO: 417
  source 1..321: note = VL12.3-(GS)4-CHIP.1-mycNLS-HA

SEQ ID NO: 2528 - protein, 323 aa, synthetic construct; identical to SEQ ID NO: 418
  source 1..323: note = VL12.3-(GS)5-CHIP.1-mycNLS-HA

SEQ ID NO: 2529 - protein, 325 aa, synthetic construct; identical to SEQ ID NO: 419
  source 1..325: note = VL12.3-(GS)6-CHIP.1-mycNLS-HA

SEQ ID NO: 2530 - protein, 176 aa, synthetic construct; identical to SEQ ID NO: 426
  source 1..176: note = HA-mycNLS-DCAF1.1-(GS)1-VL12.3

SEQ ID NO: 2531 - protein, 178 aa, synthetic construct; identical to SEQ ID NO: 427
  source 1..178: note = HA-mycNLS-DCAF1.1-(GS)2-VL12.3

SEQ ID NO: 2532 - protein, 180 aa, synthetic construct; identical to SEQ ID NO: 428
  source 1..180: note = HA-mycNLS-DCAF1.1-(GS)3-VL12.3

SEQ ID NO: 2533 - protein, 182 aa, synthetic construct; identical to SEQ ID NO: 429
  source 1..182: note = HA-mycNLS-DCAF1.1-(GS)4-VL12.3

SEQ ID NO: 2534 - protein, 184 aa, synthetic construct; identical to SEQ ID NO: 430
  source 1..184: note = HA-mycNLS-DCAF1.1-(GS)5-VL12.3

SEQ ID NO: 2535 - protein, 186 aa, synthetic construct; identical to SEQ ID NO: 431
  source 1..186: note = HA-mycNLS-DCAF1.1-(GS)6-VL12.3

SEQ ID NO: 2536 - protein, 497 aa, synthetic construct; identical to SEQ ID NO: 438
  source 1..497: note = HA-mycNLS-VL12.3-(GS)1-E6AP.1

SEQ ID NO: 2537 - protein, 499 aa, synthetic construct; identical to SEQ ID NO: 439
  source 1..499: note = HA-mycNLS-VL12.3-(GS)2-E6AP.1

SEQ ID NO: 2538 - protein, 501 aa, synthetic construct; identical to SEQ ID NO: 440
  source 1..501: note = HA-mycNLS-VL12.3-(GS)3-E6AP.1

SEQ ID NO: 2539 - protein, 503 aa, synthetic construct; identical to SEQ ID NO: 441
  source 1..503: note = HA-mycNLS-VL12.3-(GS)4-E6AP.1

SEQ ID NO: 2540 - protein, 505 aa, synthetic construct; identical to SEQ ID NO: 442
  source 1..505: note = HA-mycNLS-VL12.3-(GS)5-E6AP.1

SEQ ID NO: 2541 - protein, 507 aa, synthetic construct; identical to SEQ ID NO: 443
  source 1..507: note = HA-mycNLS-VL12.3-(GS)6-E6AP.1

SEQ ID NO: 2542 - protein, 493 aa, synthetic construct; identical to SEQ ID NO: 450
  source 1..493: note = HA-FBXW7a.1-(GS)1-VL12.3

SEQ ID NO: 2543 - protein, 495 aa, synthetic construct; identical to SEQ ID NO: 451
  source 1..495: note = HA-FBXW7a.1-(GS)2-VL12.3

SEQ ID NO: 2544 - protein, 497 aa, synthetic construct; identical to SEQ ID NO: 452
  source 1..497: note = HA-FBXW7a.1-(GS)3-VL12.3

SEQ ID NO: 2545 - protein, 499 aa, synthetic construct; identical to SEQ ID NO: 453
  source 1..499: note = HA-FBXW7a.1-(GS)4-VL12.3

SEQ ID NO: 2546 - protein, 501 aa, synthetic construct; identical to SEQ ID NO: 454
  source 1..501: note = HA-FBXW7a.1-(GS)5-VL12.3

SEQ ID NO: 2547 - protein, 503 aa, synthetic construct; identical to SEQ ID NO: 455
  source 1..503: note = HA-FBXW7a.1-(GS)6-VL12.3

SEQ ID NO: 2548 - protein, 462 aa, synthetic construct; identical to SEQ ID NO: 462
  source 1..462: note = HA-mycNLS-KEAP1.1-(GS)1-VL12.3

SEQ ID NO: 2549 - protein, 464 aa, synthetic construct; identical to SEQ ID NO: 463
  source 1..464: note = HA-mycNLS-KEAP1.1-(GS)2-VL12.3

SEQ ID NO: 2550 - protein, 466 aa, synthetic construct; identical to SEQ ID NO: 464
  source 1..466: note = HA-mycNLS-KEAP1.1-(GS)3-VL12.3

SEQ ID NO: 2551 - protein, 468 aa, synthetic construct; identical to SEQ ID NO: 465
  source 1..468: note = HA-mycNLS-KEAP1.1-(GS)4-VL12.3

SEQ ID NO: 2552 - protein, 470 aa, synthetic construct; identical to SEQ ID NO: 466
  source 1..470: note = HA-mycNLS-KEAP1.1-(GS)5-VL12.3

SEQ ID NO: 2553 - protein, 472 aa, synthetic construct; identical to SEQ ID NO: 467
  source 1..472: note = HA-mycNLS-KEAP1.1-(GS)6-VL12.3

SEQ ID NO: 2554 - protein, 268 aa, synthetic construct; identical to SEQ ID NO: 474
  source 1..268: note = HA-mycNLS-RNF125.1-(GS)1-VL12.3

SEQ ID NO: 2555 - protein, 270 aa, synthetic construct; identical to SEQ ID NO: 475
  source 1..270: note = HA-mycNLS-RNF125.1-(GS)2-VL12.3

SEQ ID NO: 2556 - protein, 272 aa, synthetic construct; identical to SEQ ID NO: 476
  source 1..272: note = HA-mycNLS-RNF125.1-(GS)3-VL12.3

SEQ ID NO: 2557 - protein, 274 aa, synthetic construct; identical to SEQ ID NO: 477
  source 1..274: note = HA-mycNLS-RNF125.1-(GS)4-VL12.3

SEQ ID NO: 2558 - protein, 276 aa, synthetic construct; identical to SEQ ID NO: 478
  source 1..276: note = HA-mycNLS-RNF125.1-(GS)5-VL12.3

SEQ ID NO: 2559 - protein, 278 aa, synthetic construct; identical to SEQ ID NO: 479
  source 1..278: note = HA-mycNLS-RNF125.1-(GS)6-VL12.3

SEQ ID NO: 2560 - protein, 367 aa, synthetic construct; identical to SEQ ID NO: 486
  source 1..367: note = VL12.3-(GS)1-SPOP.1-mycNLS-HA

SEQ ID NO: 2561 - protein, 369 aa, synthetic construct; identical to SEQ ID NO: 487
  source 1..369: note = VL12.3-(GS)2-SPOP.1-mycNLS-HA

SEQ ID NO: 2562 - protein, 371 aa, synthetic construct; identical to SEQ ID NO: 488
  source 1..371: note = VL12.3-(GS)3-SPOP.1-mycNLS-HA

SEQ ID NO: 2563 - protein, 373 aa, synthetic construct; identical to SEQ ID NO: 489
  source 1..373: note = VL12.3-(GS)4-SPOP.1-mycNLS-HA

SEQ ID NO: 2564 - protein, 376 aa, synthetic construct; identical to SEQ ID NO: 490
  source 1..376: note = VL12.3-(GS)5-SPOP.1-mycNLS-HA

SEQ ID NO: 2565 - protein, 377 aa, synthetic construct; identical to SEQ ID NO: 491
  source 1..377: note = VL12.3-(GS)6-SPOP.1-mycNLS-HA

SEQ ID NO: 2566 - protein, 181 aa, synthetic construct
  source 1..181: note = VL12.3-(GS)1-VIF.1-mycNLS-HA
MGSQPVLTQSPSVSAAPRQRVTISVSGSNSNIGSNTVNWIQQLPGRAPELLMYDDDLLAPGVSDRFSGSRSGTSASLTISGLQSEDEADYYAATWDDSLNGWVFGGGTKVTVLSGGSSESAIRNTILGRIVSPRCEYQAGHNKVGSLQYLALAALIKPKGSGSPAAKRVKLDYPYDVPDYA

SEQ ID NO: 2567 - protein, 183 aa, synthetic construct
  source 1..183: note = VL12.3-(GS)2-VIF.1-mycNLS-HA
MGSQPVLTQSPSVSAAPRQRVTISVSGSNSNIGSNTVNWIQQLPGRAPELLMYDDDLLAPGVSDRFSGSRSGTSASLTISGLQSEDEADYYAATWDDSLNGWVFGGGTKVTVLSGGSGSSESAIRNTILGRIVSPRCEYQAGHNKVGSLQYLALAALIKPKGSGSPAAKRVKLDYPYDVPDYA

SEQ ID NO: 2568 - protein, 185 aa, synthetic construct
  source 1..185: note = VL12.3-(GS)3-VIF.1-mycNLS-HA
MGSQPVLTQSPSVSAAPRQRVTISVSGSNSNIGSNTVNWIQQLPGRAPELLMYDDDLLAPGVSDRFSGSRSGTSASLTISGLQSEDEADYYAATWDDSLNGWVFGGGTKVTVLSGGSGSGSSESAIRNTILGRIVSPRCEYQAGHNKVGSLQYLALAALIKPKGSGSPAAKRVKLDYPYDVPDYA

SEQ ID NO: 2569 - protein, 187 aa, synthetic construct
  source 1..187: note = VL12.3-(GS)4-VIF.1-mycNLS-HA
MGSQPVLTQSPSVSAAPRQRVTISVSGSNSNIGSNTVNWIQQLPGRAPELLMYDDDLLAPGVSDRFSGSRSGTSASLTISGLQSEDEADYYAATWDDSLNGWVFGGGTKVTVLSGGSGSGSGSSESAIRNTILGRIVSPRCEYQAGHNKVGSLQYLALAALIKPKGSGSPAAKRVKLDYPYDVPDYA

SEQ ID NO: 2570 - protein, 189 aa, synthetic construct
  source 1..189: note = VL12.3-(GS)5-VIF.1-mycNLS-HA
MGSQPVLTQSPSVSAAPRQRVTISVSGSNSNIGSNTVNWIQQLPGRAPELLMYDDDLLAPGVSDRFSGSRSGTSASLTISGLQSEDEADYYAATWDDSLNGWVFGGGTKVTVLSGGSGSGSGSGSSESAIRNTILGRIVSPRCEYQAGHNKVGSLQYLALAALIKPKGSGSPAAKRVKLDYPYDVPDYA

SEQ ID NO: 2571 - protein, 191 aa, synthetic construct
  source 1..191: note = VL12.3-(GS)6-VIF.1-mycNLS-HA
MGSQPVLTQSPSVSAAPRQRVTISVSGSNSNIGSNTVNWIQQLPGRAPELLMYDDDLLAPGVSDRFSGSRSGTSASLTISGLQSEDEADYYAATWDDSLNGWVFGGGTKVTVLSGGSGSGSGSGSGSSESAIRNTILGRIVSPRCEYQAGHNKVGSLQYLALAALIKPKGSGSPAAKRVKLDYPYDVPDYA

SEQ ID NO: 2572 - protein, 306 aa, synthetic construct; identical to SEQ ID NO: 498
  source 1..306: note = VL12.3-(GS)1-CHIP.1-HA

SEQ ID NO: 2573 - protein, 308 aa, synthetic construct; identical to SEQ ID NO: 499
  source 1..308: note = VL12.3-(GS)2-CHIP.1-HA

SEQ ID NO: 2574 - protein, 310 aa, synthetic construct; identical to SEQ ID NO: 500
  source 1..310: note = VL12.3-(GS)3-CHIP.1-HA

SEQ ID NO: 2575 - protein, 312 aa, synthetic construct; identical to SEQ ID NO: 501
  source 1..312: note = VL12.3-(GS)4-CHIP.1-HA

SEQ ID NO: 2576 - protein, 314 aa, synthetic construct; identical to SEQ ID NO: 502
  source 1..314: note = VL12.3-(GS)5-CHIP.1-HA

SEQ ID NO: 2577 - protein, 316 aa, synthetic construct; identical to SEQ ID NO: 503
  source 1..316: note = VL12.3-(GS)6-CHIP.1-HA

SEQ ID NO: 2578 - protein, 167 aa, synthetic construct; identical to SEQ ID NO: 510
  source 1..167: note = HA-DCAF1.1-(GS)1-VL12.3

SEQ ID NO: 2579 - protein, 169 aa, synthetic construct; identical to SEQ ID NO: 511
  source 1..169: note = HA-DCAF1.1-(GS)2-VL12.3

SEQ ID NO: 2580 - protein, 171 aa, synthetic construct; identical to SEQ ID NO: 512
  source 1..171: note = HA-DCAF1.1-(GS)3-VL12.3

SEQ ID NO: 2581 - protein, 173 aa, synthetic construct; identical to SEQ ID NO: 513
  source 1..173: note = HA-DCAF1.1-(GS)4-VL12.3

SEQ ID NO: 2582 - protein, 175 aa, synthetic construct; identical to SEQ ID NO: 514
  source 1..175: note = HA-DCAF1.1-(GS)5-VL12.3

SEQ ID NO: 2583 - protein, 177 aa, synthetic construct; identical to SEQ ID NO: 515
  source 1..177: note = HA-DCAF1.1-(GS)6-VL12.3

SEQ ID NO: 2584 - protein, 488 aa, synthetic construct; identical to SEQ ID NO: 522
  source 1..488: note = HA-VL12.3-(GS)1-E6AP.1

SEQ ID NO: 2585 - protein, 490 aa, synthetic construct; identical to SEQ ID NO: 523
  source 1..490: note = HA-VL12.3-(GS)2-E6AP.1

SEQ ID NO: 2586 - protein, 492 aa, synthetic construct; identical to SEQ ID NO: 524
  source 1..492: note = HA-VL12.3-(GS)3-E6AP.1

SEQ ID NO: 2587 - protein, 494 aa, synthetic construct; identical to SEQ ID NO: 525
  source 1..494: note = HA-VL12.3-(GS)4-E6AP.1

SEQ ID NO: 2588 - protein, 496 aa, synthetic construct; identical to SEQ ID NO: 526
  source 1..496: note = HA-VL12.3-(GS)5-E6AP.1

SEQ ID NO: 2589 - protein, 498 aa, synthetic construct; identical to SEQ ID NO: 527
  source 1..498: note = HA-VL12.3-(GS)6-E6AP.1

SEQ ID NO: 2590 - protein, 413 aa, synthetic construct; identical to SEQ ID NO: 534
  source 1..413: note = HA-FBXW7b.1-(GS)1-VL12.3

SEQ ID NO: 2591 - protein, 415 aa, synthetic construct; identical to SEQ ID NO: 535
  source 1..415: note = HA-FBXW7b.1-(GS)2-VL12.3

SEQ ID NO: 2592 - protein, 417 aa, synthetic construct; identical to SEQ ID NO: 536
  source 1..417: note = HA-FBXW7b.1-(GS)3-VL12.3

SEQ ID NO: 2593 - protein, 419 aa, synthetic construct; identical to SEQ ID NO: 537
  source 1..419: note = HA-FBXW7b.1-(GS)4-VL12.3

SEQ ID NO: 2594 - protein, 421 aa, synthetic construct; identical to SEQ ID NO: 538
  source 1..421: note = HA-FBXW7b.1-(GS)5-VL12.3

SEQ ID NO: 2595 - protein, 423 aa, synthetic construct; identical to SEQ ID NO: 539
  source 1..423: note = HA-FBXW7b.1-(GS)6-VL12.3

SEQ ID NO: 2596 - protein, 453 aa, synthetic construct; identical to SEQ ID NO: 546
  source 1..453: note = HA-KEAP1.1-(GS)1-VL12.3

SEQ ID NO: 2597 - protein, 455 aa, synthetic construct; identical to SEQ ID NO: 547
  source 1..455: note = HA-KEAP1.1-(GS)2-VL12.3

SEQ ID NO: 2598 - protein, 457 aa, synthetic construct; identical to SEQ ID NO: 548
  source 1..457: note = HA-KEAP1.1-(GS)3-VL12.3

SEQ ID NO: 2599 - protein, 459 aa, synthetic construct; identical to SEQ ID NO: 549
  source 1..459: note = HA-KEAP1.1-(GS)4-VL12.3

SEQ ID NO: 2600 - protein, 461 aa, synthetic construct; identical to SEQ ID NO: 550
  source 1..461: note = HA-KEAP1.1-(GS)5-VL12.3

SEQ ID NO: 2601 - protein, 463 aa, synthetic construct; identical to SEQ ID NO: 551
  source 1..463: note = HA-KEAP1.1-(GS)6-VL12.3

SEQ ID NO: 2602 - protein, 259 aa, synthetic construct; identical to SEQ ID NO: 558
  source 1..259: note = HA-RNF125.1-(GS)1-VL12.3

SEQ ID NO: 2603 - protein, 261 aa, synthetic construct; identical to SEQ ID NO: 559
  source 1..261: note = HA-RNF125.1-(GS)2-VL12.3

SEQ ID NO: 2604 - protein, 263 aa, synthetic construct; identical to SEQ ID NO: 560
  source 1..263: note = HA-RNF125.1-(GS)3-VL12.3

SEQ ID NO: 2605 - protein, 265 aa, synthetic construct; identical to SEQ ID NO: 561
  source 1..265: note = HA-RNF125.1-(GS)4-VL12.3

SEQ ID NO: 2606 - protein, 267 aa, synthetic construct; identical to SEQ ID NO: 562
  source 1..267: note = HA-RNF125.1-(GS)5-VL12.3

SEQ ID NO: 2607 - protein, 269 aa, synthetic construct; identical to SEQ ID NO: 563
  source 1..269: note = HA-RNF125.1-(GS)6-VL12.3

SEQ ID NO: 2608 - protein, 172 aa, synthetic construct
  source 1..172: note = VL12.3-(GS)1-VIF.1-HA
MGSQPVLTQSPSVSAAPRQRVTISVSGSNSNIGSNTVNWIQQLPGRAPELLMYDDDLLAPGVSDRFSGSRSGTSASLTISGLQSEDEADYYAATWDDSLNGWVFGGGTKVTVLSGGSSESAIRNTILGRIVSPRCEYQAGHNKVGSLQYLALAALIKPKGSGSYPYDVPDYA

SEQ ID NO: 2609 - protein, 174 aa, synthetic construct
  source 1..174: note = VL12.3-(GS)2-VIF.1-HA
MGSQPVLTQSPSVSAAPRQRVTISVSGSNSNIGSNTVNWIQQLPGRAPELLMYDDDLLAPGVSDRFSGSRSGTSASLTISGLQSEDEADYYAATWDDSLNGWVFGGGTKVTVLSGGSGSSESAIRNTILGRIVSPRCEYQAGHNKVGSLQYLALAALIKPKGSGSYPYDVPDYA

SEQ ID NO: 2610 - protein, 176 aa, synthetic construct
  source 1..176: note = VL12.3-(GS)3-VIF.1-HA
MGSQPVLTQSPSVSAAPRQRVTISVSGSNSNIGSNTVNWIQQLPGRAPELLMYDDDLLAPGVSDRFSGSRSGTSASLTISGLQSEDEADYYAATWDDSLNGWVFGGGTKVTVLSGGSGSGSSESAIRNTILGRIVSPRCEYQAGHNKVGSLQYLALAALIKPKGSGSYPYDVPDYA

SEQ ID NO: 2611 - protein, 178 aa, synthetic construct
  source 1..178: note = VL12.3-(GS)4-VIF.1-HA
MGSQPVLTQSPSVSAAPRQRVTISVSGSNSNIGSNTVNWIQQLPGRAPELLMYDDDLLAPGVSDRFSGSRSGTSASLTISGLQSEDEADYYAATWDDSLNGWVFGGGTKVTVLSGGSGSGSGSSESAIRNTILGRIVSPRCEYQAGHNKVGSLQYLALAALIKPKGSGSYPYDVPDYA

SEQ ID NO: 2612 - protein, 180 aa, synthetic construct
  source 1..180: note = VL12.3-(GS)5-VIF.1-HA
MGSQPVLTQSPSVSAAPRQRVTISVSGSNSNIGSNTVNWIQQLPGRAPELLMYDDDLLAPGVSDRFSGSRSGTSASLTISGLQSEDEADYYAATWDDSLNGWVFGGGTKVTVLSGGSGSGSGSGSSESAIRNTILGRIVSPRCEYQAGHNKVGSLQYLALAALIKPKGSGSYPYDVPDYA

SEQ ID NO: 2613 - protein, 182 aa, synthetic construct
  source 1..182: note = VL12.3-(GS)6-VIF.1-HA
MGSQPVLTQSPSVSAAPRQRVTISVSGSNSNIGSNTVNWIQQLPGRAPELLMYDDDLLAPGVSDRFSGSRSGTSASLTISGLQSEDEADYYAATWDDSLNGWVFGGGTKVTVLSGGSGSGSGSGSGSSESAIRNTILGRIVSPRCEYQAGHNKVGSLQYLALAALIKPKGSGSYPYDVPDYA

SEQ ID NO: 2614 - protein, 452 aa, synthetic construct; identical to SEQ ID NO: 570
  source 1..452: note = INT41-(GS)1-CHIP.1-mycNLS-HA

SEQ ID NO: 2615 - protein, 454 aa, synthetic construct; identical to SEQ ID NO: 571
  source 1..454: note = INT41-(GS)2-CHIP.1-mycNLS-HA

SEQ ID NO: 2616 - protein, 456 aa, synthetic construct; identical to SEQ ID NO: 572
  source 1..456: note = INT41-(GS)3-CHIP.1-mycNLS-HA

SEQ ID NO: 2617 - protein, 458 aa, synthetic construct; identical to SEQ ID NO: 573
  source 1..458: note = INT41-(GS)4-CHIP.1-mycNLS-HA

SEQ ID NO: 2618 - protein, 460 aa, synthetic construct; identical to SEQ ID NO: 574
  source 1..460: note = INT41-(GS)5-CHIP.1-mycNLS-HA

SEQ ID NO: 2619 - protein, 462 aa, synthetic construct; identical to SEQ ID NO: 575
  source 1..462: note = INT41-(GS)6-CHIP.1-mycNLS-HA

SEQ ID NO: 2620 - protein, 313 aa, synthetic construct; identical to SEQ ID NO: 582
  source 1..313: note = HA-mycNLS-DCAF1.1-(GS)1-INT41

SEQ ID NO: 2621 - protein, 315 aa, synthetic construct; identical to SEQ ID NO: 583
  source 1..315: note = HA-mycNLS-DCAF1.1-(GS)2-INT41

SEQ ID NO: 2622 - protein, 317 aa, synthetic construct; identical to SEQ ID NO: 584
  source 1..317: note = HA-mycNLS-DCAF1.1-(GS)3-INT41

SEQ ID NO: 2623 - protein, 319 aa, synthetic construct; identical to SEQ ID NO: 585
  source 1..319: note = HA-mycNLS-DCAF1.1-(GS)4-INT41

SEQ ID NO: 2624 - protein, 321 aa, synthetic construct; identical to SEQ ID NO: 586
  source 1..321: note = HA-mycNLS-DCAF1.1-(GS)5-INT41

SEQ ID NO: 2625 - protein, 323 aa, synthetic construct; identical to SEQ ID NO: 587
  source 1..323: note = HA-mycNLS-DCAF1.1-(GS)6-INT41

SEQ ID NO: 2626 - protein, 634 aa, synthetic construct; identical to SEQ ID NO: 594
  source 1..634: note = HA-mycNLS-INT41-(GS)1-E6AP.1

SEQ ID NO: 2627 - protein, 636 aa, synthetic construct; identical to SEQ ID NO: 595
  source 1..636: note = HA-mycNLS-INT41-(GS)2-E6AP.1

SEQ ID NO: 2628 - protein, 638 aa, synthetic construct; identical to SEQ ID NO: 596
  source 1..638: note = HA-mycNLS-INT41-(GS)3-E6AP.1

SEQ ID NO: 2629 - protein, 640 aa, synthetic construct; identical to SEQ ID NO: 597
  source 1..640: note = HA-mycNLS-INT41-(GS)4-E6AP.1

SEQ ID NO: 2630 - protein, 642 aa, synthetic construct; identical to SEQ ID NO: 598
  source 1..642: note = HA-mycNLS-INT41-(GS)5-E6AP.1

SEQ ID NO: 2631 - protein, 644 aa, synthetic construct; identical to SEQ ID NO: 599
  source 1..644: note = HA-mycNLS-INT41-(GS)6-E6AP.1

SEQ ID NO: 2632 - protein, 630 aa, synthetic construct; identical to SEQ ID NO: 606
  source 1..630: note = HA-FBXW7a.1-(GS)1-INT41

SEQ ID NO: 2633 - protein, 632 aa, synthetic construct; identical to SEQ ID NO: 607
  source 1..632: note = HA-FBXW7a.1-(GS)2-INT41

SEQ ID NO: 2634 - protein, 634 aa, synthetic construct; identical to SEQ ID NO: 608
  source 1..634: note = HA-FBXW7a.1-(GS)3-INT41

SEQ ID NO: 2635 - protein, 636 aa, synthetic construct; identical to SEQ ID NO: 609
  source 1..636: note = HA-FBXW7a.1-(GS)4-INT41

SEQ ID NO: 2636 - protein, 638 aa, synthetic construct; identical to SEQ ID NO: 610
  source 1..638: note = HA-FBXW7a.1-(GS)5-INT41

SEQ ID NO: 2637 - protein, 640 aa, synthetic construct; identical to SEQ ID NO: 611
  source 1..640: note = HA-FBXW7a.1-(GS)6-INT41

SEQ ID NO: 2638 - protein, 599 aa, synthetic construct; identical to SEQ ID NO: 618
  source 1..599: note = HA-mycNLS-KEAP1.1-(GS)1-INT41

SEQ ID NO: 2639 - protein, 601 aa, synthetic construct; identical to SEQ ID NO: 619
  source 1..601: note = HA-mycNLS-KEAP1.1-(GS)2-INT41

SEQ ID NO: 2640 - protein, 603 aa, synthetic construct; identical to SEQ ID NO: 620
  source 1..603: note = HA-mycNLS-KEAP1.1-(GS)3-INT41

SEQ ID NO: 2641 - protein, 605 aa, synthetic construct; identical to SEQ ID NO: 621
  source 1..605: note = HA-mycNLS-KEAP1.1-(GS)4-INT41

SEQ ID NO: 2642 - protein, 607 aa, synthetic construct; identical to SEQ ID NO: 622
  source 1..607: note = HA-mycNLS-KEAP1.1-(GS)5-INT41

SEQ ID NO: 2643 - protein, 609 aa, synthetic construct; identical to SEQ ID NO: 623
  source 1..609: note = HA-mycNLS-KEAP1.1-(GS)6-INT41

SEQ ID NO: 2644 - protein, 405 aa, synthetic construct; identical to SEQ ID NO: 630
  source 1..405: note = HA-mycNLS-RNF125.1-(GS)1-INT41

SEQ ID NO: 2645 - protein, 407 aa, synthetic construct; identical to SEQ ID NO: 631
  source 1..407: note = HA-mycNLS-RNF125.1-(GS)2-INT41

SEQ ID NO: 2646 - protein, 409 aa, synthetic construct; identical to SEQ ID NO: 632
  source 1..409: note = HA-mycNLS-RNF125.1-(GS)3-INT41

SEQ ID NO: 2647 - protein, 411 aa, synthetic construct; identical to SEQ ID NO: 633
  source 1..411: note = HA-mycNLS-RNF125.1-(GS)4-INT41

SEQ ID NO: 2648 - protein, 413 aa, synthetic construct; identical to SEQ ID NO: 634
  source 1..413: note = HA-mycNLS-RNF125.1-(GS)5-INT41

SEQ ID NO: 2649 - protein, 415 aa, synthetic construct; identical to SEQ ID NO: 635
  source 1..415: note = HA-mycNLS-RNF125.1-(GS)6-INT41

SEQ ID NO: 2650 - protein, 504 aa, synthetic construct; identical to SEQ ID NO: 642
  source 1..504: note = INT41-(GS)1-SPOP.1-mycNLS-HA

SEQ ID NO: 2651 - protein, 506 aa, synthetic construct; identical to SEQ ID NO: 643
  source 1..506: note = INT41-(GS)2-SPOP.1-mycNLS-HA

SEQ ID NO: 2652 - protein, 508 aa, synthetic construct; identical to SEQ ID NO: 644
  source 1..508: note = INT41-(GS)3-SPOP.1-mycNLS-HA

SEQ ID NO: 2653 - protein, 510 aa, synthetic construct; identical to SEQ ID NO: 645
  source 1..510: note = INT41-(GS)4-SPOP.1-mycNLS-HA

SEQ ID NO: 2654 - protein, 513 aa, synthetic construct; identical to SEQ ID NO: 646
  source 1..513: note = INT41-(GS)5-SPOP.1-mycNLS-HA

SEQ ID NO: 2655 - protein, 514 aa, synthetic construct; identical to SEQ ID NO: 647
  source 1..514: note = INT41-(GS)6-SPOP.1-mycNLS-HA

SEQ ID NO: 2656 - protein, 318 aa, synthetic construct
  source 1..318: note = INT41-(GS)1-VIF.1-mycNLS-HA
MAEVQLVVSGGGLVKPGGSMILSCAASGFTFSNYSMNWVRQAPGKGLEWVSSISSSSEYIYYADFVKGRFTISRDNAKNSLYLQMDSLRAEDTAVYYCAWPGYRKAWGRGTLVTVSSGGGGSGGGGSGGGGSQSVLTQPASVSGSPGQSITISCAGTSSDVGGYNYVSWYQQHPGKAPKLMIYEDSKRPSGVSNRFSGSKSGNTASLTISGLRAEDEADYYCSYCASKGHWLFGGGTKLAVLGAAAEQKLISGSSESAIRNTILGRIVSPRCEYQAGHNKVGSLQYLALAALIKPKGSGSPAAKRVKLDYPYDVPDYA

SEQ ID NO: 2657 - protein, 320 aa, synthetic construct
  source 1..320: note = INT41-(GS)2-VIF.1-mycNLS-HA
MAEVQLVVSGGGLVKPGGSMILSCAASGFTFSNYSMNWVRQAPGKGLEWVSSISSSSEYIYYADFVKGRFTISRDNAKNSLYLQMDSLRAEDTAVYYCAWPGYRKAWGRGTLVTVSSGGGGSGGGGSGGGGSQSVLTQPASVSGSPGQSITISCAGTSSDVGGYNYVSWYQQHPGKAPKLMIYEDSKRPSGVSNRFSGSKSGNTASLTISGLRAEDEADYYCSYCASKGHWLFGGGTKLAVLGAAAEQKLISGSGSSESAIRNTILGRIVSPRCEYQAGHNKVGSLQYLALAALIKPKGSGSPAAKRVKLDYPYDVPDYA

SEQ ID NO: 2658 - protein, 322 aa, synthetic construct
  source 1..322: note = INT41-(GS)3-VIF.1-mycNLS-HA
MAEVQLVVSGGGLVKPGGSMILSCAASGFTFSNYSMNWVRQAPGKGLEWVSSISSSSEYIYYADFVKGRFTISRDNAKNSLYLQMDSLRAEDTAVYYCAWPGYRKAWGRGTLVTVSSGGGGSGGGGSGGGGSQSVLTQPASVSGSPGQSITISCAGTSSDVGGYNYVSWYQQHPGKAPKLMIYEDSKRPSGVSNRFSGSKSGNTASLTISGLRAEDEADYYCSYCASKGHWLFGGGTKLAVLGAAAEQKLISGSGSGSSESAIRNTILGRIVSPRCEYQAGHNKVGSLQYLALAALIKPKGSGSPAAKRVKLDYPYDVPDYA

SEQ ID NO: 2659 - protein, 324 aa, synthetic construct
  source 1..324: note = INT41-(GS)4-VIF.1-mycNLS-HA
MAEVQLVVSGGGLVKPGGSMILSCAASGFTFSNYSMNWVRQAPGKGLEWVSSISSSSEYIYYADFVKGRFTISRDNAKNSLYLQMDSLRAEDTAVYYCAWPGYRKAWGRGTLVTVSSGGGGSGGGGSGGGGSQSVLTQPASVSGSPGQSITISCAGTSSDVGGYNYVSWYQQHPGKAPKLMIYEDSKRPSGVSNRFSGSKSGNTASLTISGLRAEDEADYYCSYCASKGHWLFGGGTKLAVLGAAAEQKLISGSGSGSGSSESAIRNTILGRIVSPRCEYQAGHNKVGSLQYLALAALIKPKGSGSPAAKRVKLDYPYDVPDYA

SEQ ID NO: 2660 - protein, 326 aa, synthetic construct
  source 1..326: note = INT41-(GS)5-VIF.1-mycNLS-HA
MAEVQLVVSGGGLVKPGGSMILSCAASGFTFSNYSMNWVRQAPGKGLEWVSSISSSSEYIYYADFVKGRFTISRDNAKNSLYLQMDSLRAEDTAVYYCAWPGYRKAWGRGTLVTVSSGGGGSGGGGSGGGGSQSVLTQPASVSGSPGQSITISCAGTSSDVGGYNYVSWYQQHPGKAPKLMIYEDSKRPSGVSNRFSGSKSGNTASLTISGLRAEDEADYYCSYCASKGHWLFGGGTKLAVLGAAAEQKLISGSGSGSGSGSSESAIRNTILGRIVSPRCEYQAGHNKVGSLQYLALAALIKPKGSGSPAAKRVKLDYPYDVPDYA

SEQ ID NO: 2661 - protein, 328 aa, synthetic construct
  source 1..328: note = INT41-(GS)6-VIF.1-mycNLS-HA
MAEVQLVVSGGGLVKPGGSMILSCAASGFTFSNYSMNWVRQAPGKGLEWVSSISSSSEYIYYADFVKGRFTISRDNAKNSLYLQMDSLRAEDTAVYYCAWPGYRKAWGRGTLVTVSSGGGGSGGGGSGGGGSQSVLTQPASVSGSPGQSITISCAGTSSDVGGYNYVSWYQQHPGKAPKLMIYEDSKRPSGVSNRFSGSKSGNTASLTISGLRAEDEADYYCSYCASKGHWLFGGGTKLAVLGAAAEQKLISGSGSGSGSGSGSSESAIRNTILGRIVSPRCEYQAGHNKVGSLQYLALAALIKPKGSGSPAAKRVKLDYPYDVPDYA

SEQ ID NO: 2662 - protein, 443 aa, synthetic construct; identical to SEQ ID NO: 654
  source 1..443: note = INT41-(GS)1-CHIP.1-HA

SEQ ID NO: 2663 - protein, 445 aa, synthetic construct; identical to SEQ ID NO: 655
  source 1..445: note = INT41-(GS)2-CHIP.1-HA

SEQ ID NO: 2664 - protein, 447 aa, synthetic construct; identical to SEQ ID NO: 656
  source 1..447: note = INT41-(GS)3-CHIP.1-HA

SEQ ID NO: 2665 - protein, 449 aa, synthetic construct; identical to SEQ ID NO: 657
  source 1..449: note = INT41-(GS)4-CHIP.1-HA

SEQ ID NO: 2666 - protein, 451 aa, synthetic construct; identical to SEQ ID NO: 658
  source 1..451: note = INT41-(GS)5-CHIP.1-HA

SEQ ID NO: 2667 - protein, 453 aa, synthetic construct; identical to SEQ ID NO: 659
  source 1..453: note = INT41-(GS)6-CHIP.1-HA

SEQ ID NO: 2668 - protein, 304 aa, synthetic construct; identical to SEQ ID NO: 666
  source 1..304: note = HA-DCAF1.1-(GS)1-INT41

SEQ ID NO: 2669 - protein, 306 aa, synthetic construct; identical to SEQ ID NO: 667
  source 1..306: note = HA-DCAF1.1-(GS)2-INT41

SEQ ID NO: 2670 - protein, 308 aa, synthetic construct; identical to SEQ ID NO: 668
  source 1..308: note = HA-DCAF1.1-(GS)3-INT41

SEQ ID NO: 2671 - protein, 310 aa, synthetic construct; identical to SEQ ID NO: 669
  source 1..310: note = HA-DCAF1.1-(GS)4-INT41

SEQ ID NO: 2672 - protein, 312 aa, synthetic construct; identical to SEQ ID NO: 670
  source 1..312: note = HA-DCAF1.1-(GS)5-INT41

SEQ ID NO: 2673 - protein, 314 aa, synthetic construct; identical to SEQ ID NO: 671
  source 1..314: note = HA-DCAF1.1-(GS)6-INT41

SEQ ID NO: 2674 - protein, 625 aa, synthetic construct; identical to SEQ ID NO: 678
  source 1..625: note = HA-INT41-(GS)1-E6AP.1

SEQ ID NO: 2675 - protein, 627 aa, synthetic construct; identical to SEQ ID NO: 679
  source 1..627: note = HA-INT41-(GS)2-E6AP.1

SEQ ID NO: 2676 - protein, 629 aa, synthetic construct; identical to SEQ ID NO: 680
  source 1..629: note = HA-INT41-(GS)3-E6AP.1

SEQ ID NO: 2677 - protein, 631 aa, synthetic construct; identical to SEQ ID NO: 681
  source 1..631: note = HA-INT41-(GS)4-E6AP.1

SEQ ID NO: 2678 - protein, 633 aa, synthetic construct; identical to SEQ ID NO: 682
  source 1..633: note = HA-INT41-(GS)5-E6AP.1

SEQ ID NO: 2679 - protein, 635 aa, synthetic construct; identical to SEQ ID NO: 683
  source 1..635: note = HA-INT41-(GS)6-E6AP.1

SEQ ID NO: 2680 - protein, 550 aa, synthetic construct; identical to SEQ ID NO: 690
  source 1..550: note = HA-FBXW7b.1-(GS)1-INT41

SEQ ID NO: 2681 - protein, 552 aa, synthetic construct; identical to SEQ ID NO: 691
  source 1..552: note = HA-FBXW7b.1-(GS)2-INT41

SEQ ID NO: 2682 - protein, 554 aa, synthetic construct; identical to SEQ ID NO: 692
  source 1..554: note = HA-FBXW7b.1-(GS)3-INT41

SEQ ID NO: 2683 - protein, 556 aa, synthetic construct; identical to SEQ ID NO: 693
  source 1..556: note = HA-FBXW7b.1-(GS)4-INT41

SEQ ID NO: 2684 - protein, 558 aa, synthetic construct; identical to SEQ ID NO: 694
  source 1..558: note = HA-FBXW7b.1-(GS)5-INT41

SEQ ID NO: 2685 - protein, 560 aa, synthetic construct; identical to SEQ ID NO: 695
  source 1..560: note = HA-FBXW7b.1-(GS)6-INT41

SEQ ID NO: 2686 - protein, 590 aa, synthetic construct; identical to SEQ ID NO: 702
  source 1..590: note = HA-KEAP1.1-(GS)1-INT41

SEQ ID NO: 2687 - protein, 592 aa, synthetic construct; identical to SEQ ID NO: 703
  source 1..592: note = HA-KEAP1.1-(GS)2-INT41

SEQ ID NO: 2688 - protein, 594 aa, synthetic construct; identical to SEQ ID NO: 704
  source 1..594: note = HA-KEAP1.1-(GS)3-INT41

SEQ ID NO: 2689 - protein, 596 aa, synthetic construct; identical to SEQ ID NO: 705
  source 1..596: note = HA-KEAP1.1-(GS)4-INT41

SEQ ID NO: 2690 - protein, 598 aa, synthetic construct; identical to SEQ ID NO: 706
  source 1..598: note = HA-KEAP1.1-(GS)5-INT41

SEQ ID NO: 2691 - protein, 600 aa, synthetic construct; identical to SEQ ID NO: 707
  source 1..600: note = HA-KEAP1.1-(GS)6-INT41

SEQ ID NO: 2692 - protein, 396 aa, synthetic construct; identical to SEQ ID NO: 714
  source 1..396: note = HA-RNF125.1-(GS)1-INT41

SEQ ID NO: 2693 - protein, 398 aa, synthetic construct; identical to SEQ ID NO: 715
  source 1..398: note = HA-RNF125.1-(GS)2-INT41

SEQ ID NO: 2694 - protein, 400 aa, synthetic construct; identical to SEQ ID NO: 716
  source 1..400: note = HA-RNF125.1-(GS)3-INT41

SEQ ID NO: 2695 - protein, 402 aa, synthetic construct; identical to SEQ ID NO: 717
  source 1..402: note = HA-RNF125.1-(GS)4-INT41

SEQ ID NO: 2696 - protein, 404 aa, synthetic construct; identical to SEQ ID NO: 718
  source 1..404: note = HA-RNF125.1-(GS)5-INT41

SEQ ID NO: 2697 - protein, 406 aa, synthetic construct; identical to SEQ ID NO: 719
  source 1..406: note = HA-RNF125.1-(GS)6-INT41

SEQ ID NO: 2698 - protein, 309 aa, synthetic construct
  source 1..309: note = INT41-(GS)1-VIF.1-HA
MAEVQLVVSGGGLVKPGGSMILSCAASGFTFSNYSMNWVRQAPGKGLEWVSSISSSSEYIYYADFVKGRFTISRDNAKNSLYLQMDSLRAEDTAVYYCAWPGYRKAWGRGTLVTVSSGGGGSGGGGSGGGGSQSVLTQPASVSGSPGQSITISCAGTSSDVGGYNYVSWYQQHPGKAPKLMIYEDSKRPSGVSNRFSGSKSGNTASLTISGLRAEDEADYYCSYCASKGHWLFGGGTKLAVLGAAAEQKLISGSSESAIRNTILGRIVSPRCEYQAGHNKVGSLQYLALAALIKPKGSGSYPYDVPDYA

SEQ ID NO: 2699 - protein, 311 aa, synthetic construct
  source 1..311: note = INT41-(GS)2-VIF.1-HA
MAEVQLVVSGGGLVKPGGSMILSCAASGFTFSNYSMNWVRQAPGKGLEWVSSISSSSEYIYYADFVKGRFTISRDNAKNSLYLQMDSLRAEDTAVYYCAWPGYRKAWGRGTLVTVSSGGGGSGGGGSGGGGSQSVLTQPASVSGSPGQSITISCAGTSSDVGGYNYVSWYQQHPGKAPKLMIYEDSKRPSGVSNRFSGSKSGNTASLTISGLRAEDEADYYCSYCASKGHWLFGGGTKLAVLGAAAEQKLISGSGSSESAIRNTILGRIVSPRCEYQAGHNKVGSLQYLALAALIKPKGSGSYPYDVPDYA

SEQ ID NO: 2700 - protein, 313 aa, synthetic construct
  source 1..313: note = INT41-(GS)3-VIF.1-HA
MAEVQLVVSGGGLVKPGGSMILSCAASGFTFSNYSMNWVRQAPGKGLEWVSSISSSSEYIYYADFVKGRFTISRDNAKNSLYLQMDSLRAEDTAVYYCAWPGYRKAWGRGTLVTVSSGGGGSGGGGSGGGGSQSVLTQPASVSGSPGQSITISCAGTSSDVGGYNYVSWYQQHPGKAPKLMIYEDSKRPSGVSNRFSGSKSGNTASLTISGLRAEDEADYYCSYCASKGHWLFGGGTKLAVLGAAAEQKLISGSGSGSSESAIRNTILGRIVSPRCEYQAGHNKVGSLQYLALAALIKPKGSGSYPYDVPDYA

SEQ ID NO: 2701 - protein, 315 aa, synthetic construct
  source 1..315: note = INT41-(GS)4-VIF.1-HA
MAEVQLVVSGGGLVKPGGSMILSCAASGFTFSNYSMNWVRQAPGKGLEWVSSISSSSEYIYYADFVKGRFTISRDNAKNSLYLQMDSLRAEDTAVYYCAWPGYRKAWGRGTLVTVSSGGGGSGGGGSGGGGSQSVLTQPASVSGSPGQSITISCAGTSSDVGGYNYVSWYQQHPGKAPKLMIYEDSKRPSGVSNRFSGSKSGNTASLTISGLRAEDEADYYCSYCASKGHWLFGGGTKLAVLGAAAEQKLISGSGSGSGSSESAIRNTILGRIVSPRCEYQAGHNKVGSLQYLALAALIKPKGSGSYPYDVPDYA

SEQ ID NO: 2702 - protein, 317 aa, synthetic construct
  source 1..317: note = INT41-(GS)5-VIF.1-HA
MAEVQLVVSGGGLVKPGGSMILSCAASGFTFSNYSMNWVRQAPGKGLEWVSSISSSSEYIYYADFVKGRFTISRDNAKNSLYLQMDSLRAEDTAVYYCAWPGYRKAWGRGTLVTVSSGGGGSGGGGSGGGGSQSVLTQPASVSGSPGQSITISCAGTSSDVGGYNYVSWYQQHPGKAPKLMIYEDSKRPSGVSNRFSGSKSGNTASLTISGLRAEDEADYYCSYCASKGHWLFGGGTKLAVLGAAAEQKLISGSGSGSGSGSSESAIRNTILGRIVSPRCEYQAGHNKVGSLQYLALAALIKPKGSGSYPYDVPDYA

SEQ ID NO: 2703 - protein, 319 aa, synthetic construct
  source 1..319: note = INT41-(GS)6-VIF.1-HA
MAEVQLVVSGGGLVKPGGSMILSCAASGFTFSNYSMNWVRQAPGKGLEWVSSISSSSEYIYYADFVKGRFTISRDNAKNSLYLQMDSLRAEDTAVYYCAWPGYRKAWGRGTLVTVSSGGGGSGGGGSGGGGSQSVLTQPASVSGSPGQSITISCAGTSSDVGGYNYVSWYQQHPGKAPKLMIYEDSKRPSGVSNRFSGSKSGNTASLTISGLRAEDEADYYCSYCASKGHWLFGGGTKLAVLGAAAEQKLISGSGSGSGSGSGSSESAIRNTILGRIVSPRCEYQAGHNKVGSLQYLALAALIKPKGSGSYPYDVPDYA

SEQ ID NO: 2704 - protein, 497 aa, synthetic construct
  source 1..497: note = HA-FBXW7a.1.2-(GS)3-VL12.3
MYPYDVPDYANQELLSVGNKRRRTGGNLRGNPSSSQVDEEQMNRVVEEEQQQQLRQQEEEHTARNGEVVGVEPRPGGQNDSQQGQLEENNNRFISVDEDSSGNQEEQEEDEEHAGEQDEEDEEEEEMDQESDDFDQSDDSSREDEHTHTNSVTNSSSIVDLPVHQLSSPFYTKTTKMKRKLDHGNEVRSFSLGKKPCKVSEYTSTTGLVPCSANPTTFGDLRAANGQGQQRRRITSVQPPTGLQEWLKMFQSWSGPEKLLALDELIDSCEPTQVKHMMQVIEPQFQRDFISLLPKELALYVLSFLEPKDLLQAAQTCRYWRILAEDNLLWREKCKEEGIDEPLHIKRRKVIKPGFIHSPWKSAYIRQHRIDTNSRRGGSGSGSGSQPVLTQSPSVSAAPRQRVTISVSGSNSNIGSNTVNWIQQLPGRAPELLMYDDDLLAPGVSDRFSGSRSGTSASLTISGLQSEDEADYYAATWDDSLNGWVFGGGTKVTVLSG

SEQ ID NO: 2705 - protein, 497 aa, synthetic construct
  source 1..497: note = HA-FBXW7a.1.3-(GS)3-VL12.3
MYPYDVPDYANQELLSVGSKRRRTGGSLRGNPSSSQVDEEQMNRVVEEEQQQQLRQQEEEHTARNGEVVGVEPRPGGQNDSQQGQLEENNNRFISVDEDSSGNQEEQEEDEEHAGEQDEEDEEEEEMDQESDDFDQSDDSSREDEHTHTNSVTNSSSIVDLPVHQLSSPFYTKTTKMKRKLDHGSEVRSFSLGKKPCKVSEYTSTTGLVPCSATPTTFGDLRAANGQGQQRRRINNVQPPTGLQEWLKMFQSWSGPEKLLALDELIDSCEPTQVKHMMQVIEPQFQRDFISLLPKELALYVLSFLEPKDLLQAAQTCRYWRILAEDNLLWREKCKEEGIDEPLHIKRRKVIKPGFIHSPWKSAYIRQHRIDTNSRRGGSGSGSGSQPVLTQSPSVSAAPRQRVTISVSGSNSNIGSNTVNWIQQLPGRAPELLMYDDDLLAPGVSDRFSGSRSGTSASLTISGLQSEDEADYYAATWDDSLNGWVFGGGTKVTVLSG

SEQ ID NO: 2706 - protein, 497 aa, synthetic construct
  source 1..497: note = HA-FBXW7a.1.4-(GS)3-VL12.3
MYPYDVPDYANQELLSVGNKRRRTGGNLRGNPSSSQVDEEQMNRVVEEEQQQQLRQQEEEHTARNGEVVGVEPRPGGQNDSQQGQLEENNNRFISVDEDSSGNQEEQEEDEEHAGEQDEEDEEEEEMDQESDDFDQSDDSSREDEHTHTNSVTNSSSIVDLPVHQLSSPFYTKTTKMKRKLDHGNEVRSFSLGKKPCKVSEYTSTTGLVPCSANPTTFGDLRAANGQGQQRRRINNVQPPTGLQEWLKMFQSWSGPEKLLALDELIDSCEPTQVKHMMQVIEPQFQRDFISLLPKELALYVLSFLEPKDLLQAAQTCRYWRILAEDNLLWREKCKEEGIDEPLHIKRRKVIKPGFIHSPWKSAYIRQHRIDTNSRRGGSGSGSGSQPVLTQSPSVSAAPRQRVTISVSGSNSNIGSNTVNWIQQLPGRAPELLMYDDDLLAPGVSDRFSGSRSGTSASLTISGLQSEDEADYYAATWDDSLNGWVFGGGTKVTVLSG

SEQ ID NO: 2707 - protein, 347 aa, synthetic construct
  source 1..347: note = HA-mycNLS-FBXW7a.5-(GS)3-VL12.3
MYPYDVPDYAPAAKRVKLDGSGSGSKMKRKLDHGSEVRSFSLGKKPCKVSEYTSTTGLVPCSATPTTFGDLRAANGQGQQRRRITSVQPPTGLQEWLKMFQSWSGPEKLLALDELIDSCEPTQVKHMMQVIEPQFQRDFISLLPKELALYVLSFLEPKDLLQAAQTCRYWRILAEDNLLWREKCKEEGIDEPLHIKRRKVIKPGFIHSPWKSAYIRQHRIDTNSRRGGSGSGSGSQPVLTQSPSVSAAPRQRVTISVSGSNSNIGSNTVNWIQQLPGRAPELLMYDDDLLAPGVSDRFSGSRSGTSASLTISGLQSEDEADYYAATWDDSLNGWVFGGGTKVTVLSG

SEQ ID NO: 2708 - protein, 347 aa, synthetic construct
  source 1..347: note = HA-mycNLS-FBXW7a.6 -(GS)3-VL12.3
MYPYDVPDYAPAAKRVKLDGSGSGSKMKRKLDHGNEVRSFSLGKKPCKVSEYTSTTGLVPCSANPTTFGDLRAANGQGQQRRRITSVQPPTGLQEWLKMFQSWSGPEKLLALDELIDSCEPTQVKHMMQVIEPQFQRDFISLLPKELALYVLSFLEPKDLLQAAQTCRYWRILAEDNLLWREKCKEEGIDEPLHIKRRKVIKPGFIHSPWKSAYIRQHRIDTNSRRGGSGSGSGSQPVLTQSPSVSAAPRQRVTISVSGSNSNIGSNTVNWIQQLPGRAPELLMYDDDLLAPGVSDRFSGSRSGTSASLTISGLQSEDEADYYAATWDDSLNGWVFGGGTKVTVLSG

SEQ ID NO: 2709 - protein, 347 aa, synthetic construct
  source 1..347: note = HA-mycNLS-FBXW7a.7-(GS)3-VL12.3
MYPYDVPDYAPAAKRVKLDGSGSGSKMKRKLDHGSEVRSFSLGKKPCKVSEYTSTTGLVPCSATPTTFGDLRAANGQGQQRRRINNVQPPTGLQEWLKMFQSWSGPEKLLALDELIDSCEPTQVKHMMQVIEPQFQRDFISLLPKELALYVLSFLEPKDLLQAAQTCRYWRILAEDNLLWREKCKEEGIDEPLHIKRRKVIKPGFIHSPWKSAYIRQHRIDTNSRRGGSGSGSGSQPVLTQSPSVSAAPRQRVTISVSGSNSNIGSNTVNWIQQLPGRAPELLMYDDDLLAPGVSDRFSGSRSGTSASLTISGLQSEDEADYYAATWDDSLNGWVFGGGTKVTVLSG

SEQ ID NO: 2710 - protein, 347 aa, synthetic construct
  source 1..347: note = HA-mycNLS-FBXW7a.8-(GS)3-VL12.3
MYPYDVPDYAPAAKRVKLDGSGSGSKMKRKLDHGNEVRSFSLGKKPCKVSEYTSTTGLVPCSANPTTFGDLRAANGQGQQRRRINNVQPPTGLQEWLKMFQSWSGPEKLLALDELIDSCEPTQVKHMMQVIEPQFQRDFISLLPKELALYVLSFLEPKDLLQAAQTCRYWRILAEDNLLWREKCKEEGIDEPLHIKRRKVIKPGFIHSPWKSAYIRQHRIDTNSRRGGSGSGSGSQPVLTQSPSVSAAPRQRVTISVSGSNSNIGSNTVNWIQQLPGRAPELLMYDDDLLAPGVSDRFSGSRSGTSASLTISGLQSEDEADYYAATWDDSLNGWVFGGGTKVTVLSG

SEQ ID NO: 2711 - protein, 251 aa, synthetic construct
  source 1..251: note = HA-mycNLS-FBXW7a.9-(GS)3-VL12.3
MYPYDVPDYAPAAKRVKLDGSGSGSTQVKHMMQVIEPQFQRDFISLLPKELALYVLSFLEPKDLLQAAQTCRYWRILAEDNLLWREKCKEEGIDEPLHIKRRKVIKPGFIHSPWKSAYIRQHRIDTNSRRGGSGSGSGSQPVLTQSPSVSAAPRQRVTISVSGSNSNIGSNTVNWIQQLPGRAPELLMYDDDLLAPGVSDRFSGSRSGTSASLTISGLQSEDEADYYAATWDDSLNGWVFGGGTKVTVLSG

SEQ ID NO: 2712 - protein, 417 aa, synthetic construct
  source 1..417: note = HA-FBXW7b.2-(GS)3-VL12.3
MYPYDVPDYACVPRSGLILSCICLYCGVLLPVLLPNLPFLTCLSMSTLESVTYLPEKGLYCQRLPSSRTHGGTESLKGKNTENMGFYGTLKMIFYKMKRKLDHGNEVRSFSLGKKPCKVSEYTSTTGLVPCSANPTTFGDLRAANGQGQQRRRITSVQPPTGLQEWLKMFQSWSGPEKLLALDELIDSCEPTQVKHMMQVIEPQFQRDFISLLPKELALYVLSFLEPKDLLQAAQTCRYWRILAEDNLLWREKCKEEGIDEPLHIKRRKVIKPGFIHSPWKSAYIRQHRIDTNSRRGGSGSGSGSQPVLTQSPSVSAAPRQRVTISVSGSNSNIGSNTVNWIQQLPGRAPELLMYDDDLLAPGVSDRFSGSRSGTSASLTISGLQSEDEADYYAATWDDSLNGWVFGGGTKVTVLSG

SEQ ID NO: 2713 - protein, 417 aa, synthetic construct
  source 1..417: note = HA-FBXW7b.3-(GS)3-VL12.3
MYPYDVPDYACVPRSGLILSCICLYCGVLLPVLLPNLPFLTCLSMSTLESVTYLPEKGLYCQRLPSSRTHGGTESLKGKNTENMGFYGTLKMIFYKMKRKLDHGSEVRSFSLGKKPCKVSEYTSTTGLVPCSATPTTFGDLRAANGQGQQRRRINNVQPPTGLQEWLKMFQSWSGPEKLLALDELIDSCEPTQVKHMMQVIEPQFQRDFISLLPKELALYVLSFLEPKDLLQAAQTCRYWRILAEDNLLWREKCKEEGIDEPLHIKRRKVIKPGFIHSPWKSAYIRQHRIDTNSRRGGSGSGSGSQPVLTQSPSVSAAPRQRVTISVSGSNSNIGSNTVNWIQQLPGRAPELLMYDDDLLAPGVSDRFSGSRSGTSASLTISGLQSEDEADYYAATWDDSLNGWVFGGGTKVTVLSG

SEQ ID NO: 2714 - protein, 417 aa, synthetic construct
  source 1..417: note = HA-FBXW7b.4-(GS)3-VL12.3
MYPYDVPDYACVPRSGLILSCICLYCGVLLPVLLPNLPFLTCLSMSTLESVTYLPEKGLYCQRLPSSRTHGGTESLKGKNTENMGFYGTLKMIFYKMKRKLDHGNEVRSFSLGKKPCKVSEYTSTTGLVPCSANPTTFGDLRAANGQGQQRRRINNVQPPTGLQEWLKMFQSWSGPEKLLALDELIDSCEPTQVKHMMQVIEPQFQRDFISLLPKELALYVLSFLEPKDLLQAAQTCRYWRILAEDNLLWREKCKEEGIDEPLHIKRRKVIKPGFIHSPWKSAYIRQHRIDTNSRRGGSGSGSGSQPVLTQSPSVSAAPRQRVTISVSGSNSNIGSNTVNWIQQLPGRAPELLMYDDDLLAPGVSDRFSGSRSGTSASLTISGLQSEDEADYYAATWDDSLNGWVFGGGTKVTVLSG

SEQ ID NO: 2715 - protein, 238 aa, synthetic construct
  source 1..238: note = HA-mycNLS-NHLRC1.1-(GS)3-VL12.3
MGYPYDVPDYAPAAKRVKLDGSGSGSESGPALHELMREAEISLLECKVCFEKFGHRQQRRPRNLSCGHVVCLACVAALAHPRTLALECPFCRRACRGCDTSDCLPVLHLIELLGSALRGSGSGSGSQPVLTQSPSVSAAPRQRVTISVSGSNSNIGSNTVNWIQQLPGRAPELLMYDDDLLAPGVSDRFSGSRSGTSASLTISGLQSEDEADYYAATWDDSLNGWVFGGGTKVTVLSG

SEQ ID NO: 2716 - protein, 238 aa, synthetic construct
  source 1..238: note = HA-mycNLS-VL12.3-(GS)3-NHLRC1.1
MGYPYDVPDYAPAAKRVKLDGSGSGSGSQPVLTQSPSVSAAPRQRVTISVSGSNSNIGSNTVNWIQQLPGRAPELLMYDDDLLAPGVSDRFSGSRSGTSASLTISGLQSEDEADYYAATWDDSLNGWVFGGGTKVTVLSGGSGSGSESGPALHELMREAEISLLECKVCFEKFGHRQQRRPRNLSCGHVVCLACVAALAHPRTLALECPFCRRACRGCDTSDCLPVLHLIELLGSALR

SEQ ID NO: 2717 - protein, 207 aa, synthetic construct
  source 1..207: note = HA-mycNLS-RNF4.1-(GS)3-VL12.3
MGYPYDVPDYAPAAKRVKLDGSGSGSVSCPICMDGYSEIVQNGRLIVSTECGHVFCSQCLRDSLKNANTCPTCRKKINHKRYHPIYIGSGSGSGSQPVLTQSPSVSAAPRQRVTISVSGSNSNIGSNTVNWIQQLPGRAPELLMYDDDLLAPGVSDRFSGSRSGTSASLTISGLQSEDEADYYAATWDDSLNGWVFGGGTKVTVLSG

SEQ ID NO: 2718 - protein, 207 aa, synthetic construct
  source 1..207: note = HA-mycNLS-VL12.3-(GS)3-RNF4.1
MGYPYDVPDYAPAAKRVKLDGSGSGSGSQPVLTQSPSVSAAPRQRVTISVSGSNSNIGSNTVNWIQQLPGRAPELLMYDDDLLAPGVSDRFSGSRSGTSASLTISGLQSEDEADYYAATWDDSLNGWVFGGGTKVTVLSGGSGSGSVSCPICMDGYSEIVQNGRLIVSTECGHVFCSQCLRDSLKNANTCPTCRKKINHKRYHPIYI

SEQ ID NO: 2719 - protein, 215 aa, synthetic construct
  source 1..215: note = HA-mycNLS-RNF12.1-(GS)3-VL12.3
MGYPYDVPDYAPAAKRVKLDGSGSGSGLTKEQIDNLAMRSFGENDALKTCSVCITEYTEGNKLRKLPCSHEYHVHCIDRWLSENSTCPICRRAVLGSGSGSGSQPVLTQSPSVSAAPRQRVTISVSGSNSNIGSNTVNWIQQLPGRAPELLMYDDDLLAPGVSDRFSGSRSGTSASLTISGLQSEDEADYYAATWDDSLNGWVFGGGTKVTVLSG

SEQ ID NO: 2720 - protein, 224 aa, synthetic construct
  source 1..224: note = HA-mycNLS-VL12.3-(GS)3-RNF12.2
MGYPYDVPDYAPAAKRVKLDGSGSGSGSQPVLTQSPSVSAAPRQRVTISVSGSNSNIGSNTVNWIQQLPGRAPELLMYDDDLLAPGVSDRFSGSRSGTSASLTISGLQSEDEADYYAATWDDSLNGWVFGGGTKVTVLSGGSGSGSGLTKEQIDNLAMRSFGENDALKTCSVCITEYTEGNKLRKLPCSHEYHVHCIDRWLSENSTCPICRRAVLASGNRESVV

SEQ ID NO: 2721 - protein, 202 aa, synthetic construct
  source 1..202: note = HA-mycNLS-RNF182.1-(GS)3-VL12.3
MGYPYDVPDYAPAAKRVKLDGSGSGSECKICYNRYNLKQRKPKVLECCHRVCAKCLYKIIDFGDSPQGVIVCPFCRFETCLPGSGSGSGSQPVLTQSPSVSAAPRQRVTISVSGSNSNIGSNTVNWIQQLPGRAPELLMYDDDLLAPGVSDRFSGSRSGTSASLTISGLQSEDEADYYAATWDDSLNGWVFGGGTKVTVLSG

SEQ ID NO: 2722 - protein, 202 aa, synthetic construct
  source 1..202: note = HA-mycNLS-VL12.3-(GS)3-RNF182.1
MGYPYDVPDYAPAAKRVKLDGSGSGSGSQPVLTQSPSVSAAPRQRVTISVSGSNSNIGSNTVNWIQQLPGRAPELLMYDDDLLAPGVSDRFSGSRSGTSASLTISGLQSEDEADYYAATWDDSLNGWVFGGGTKVTVLSGGSGSGSECKICYNRYNLKQRKPKVLECCHRVCAKCLYKIIDFGDSPQGVIVCPFCRFETCLP

SEQ ID NO: 2723 - protein, 216 aa, synthetic construct
  source 1..216: note = HA-mycNLS-RNF20.1-(GS)3-VL12.3
MGYPYDVPDYAPAAKRVKLDGSGSGSDEILMEEIKDYKARLTCPCCNMRKKDAVLTKCFHVFCFECVKTRYDTRQRKCPKCNAAFGANDFHRIYIGGSGSGSGSQPVLTQSPSVSAAPRQRVTISVSGSNSNIGSNTVNWIQQLPGRAPELLMYDDDLLAPGVSDRFSGSRSGTSASLTISGLQSEDEADYYAATWDDSLNGWVFGGGTKVTVLSG

SEQ ID NO: 2724 - protein, 216 aa, synthetic construct
  source 1..216: note = HA-mycNLS-VL12.3-(GS)3-RNF20.1
MGYPYDVPDYAPAAKRVKLDGSGSGSGSQPVLTQSPSVSAAPRQRVTISVSGSNSNIGSNTVNWIQQLPGRAPELLMYDDDLLAPGVSDRFSGSRSGTSASLTISGLQSEDEADYYAATWDDSLNGWVFGGGTKVTVLSGGSGSGSDEILMEEIKDYKARLTCPCCNMRKKDAVLTKCFHVFCFECVKTRYDTRQRKCPKCNAAFGANDFHRIYIG

SEQ ID NO: 2725 - protein, 246 aa, synthetic construct
  source 1..246: note = HA-mycNLS-RNF138.1-(GS)3-VL12.3
MGYPYDVPDYAPAAKRVKLDGSGSGSDDFYCPVCQEVLKTPVRTTACQHVFCRKCFLTAMRESGAHCPLCRGNVTRRERACPERALDLENIMRKFSGSCRCCAKQIKFYRMRHHYKSCKKYQDEYGGSGSGSGSQPVLTQSPSVSAAPRQRVTISVSGSNSNIGSNTVNWIQQLPGRAPELLMYDDDLLAPGVSDRFSGSRSGTSASLTISGLQSEDEADYYAATWDDSLNGWVFGGGTKVTVLSG

SEQ ID NO: 2726 - protein, 246 aa, synthetic construct
  source 1..246: note = HA-mycNLS-VL12.3-(GS)3-RNF138.1
MGYPYDVPDYAPAAKRVKLDGSGSGSGSQPVLTQSPSVSAAPRQRVTISVSGSNSNIGSNTVNWIQQLPGRAPELLMYDDDLLAPGVSDRFSGSRSGTSASLTISGLQSEDEADYYAATWDDSLNGWVFGGGTKVTVLSGGSGSGSDDFYCPVCQEVLKTPVRTTACQHVFCRKCFLTAMRESGAHCPLCRGNVTRRERACPERALDLENIMRKFSGSCRCCAKQIKFYRMRHHYKSCKKYQDEYG

SEQ ID NO: 2727 - protein, 198 aa, synthetic construct
  source 1..198: note = HA-mycNLS-RNF128.1-(GS)3-VL12.3
MGYPYDVPDYAPAAKRVKLDGSGSGSDSCAVCIELYKPNDLVRILTCNHIFHKTCVDPWLLEHRTCPMCKCDILKALGGSGSGSGSQPVLTQSPSVSAAPRQRVTISVSGSNSNIGSNTVNWIQQLPGRAPELLMYDDDLLAPGVSDRFSGSRSGTSASLTISGLQSEDEADYYAATWDDSLNGWVFGGGTKVTVLSG

SEQ ID NO: 2728 - protein, 198 aa, synthetic construct
  source 1..198: note = HA-mycNLS-VL12.3-(GS)3-RNF128.1
MGYPYDVPDYAPAAKRVKLDGSGSGSGSQPVLTQSPSVSAAPRQRVTISVSGSNSNIGSNTVNWIQQLPGRAPELLMYDDDLLAPGVSDRFSGSRSGTSASLTISGLQSEDEADYYAATWDDSLNGWVFGGGTKVTVLSGGSGSGSDSCAVCIELYKPNDLVRILTCNHIFHKTCVDPWLLEHRTCPMCKCDILKALG

SEQ ID NO: 2729 - protein, 232 aa, synthetic construct
  source 1..232: note = HA-mycNLS-ZNRF1.1-(GS)3-VL12.3
MGYPYDVPDYAPAAKRVKLDGSGSGSGFKCPICSKSVASDEMEMHFIMCLSKPRLSYNDDVLTKDAGECVICLEELLQGDTIARLPCLCIYHKSCIDSWFEVNRSCPEHPADGSGSGSGSQPVLTQSPSVSAAPRQRVTISVSGSNSNIGSNTVNWIQQLPGRAPELLMYDDDLLAPGVSDRFSGSRSGTSASLTISGLQSEDEADYYAATWDDSLNGWVFGGGTKVTVLSG

SEQ ID NO: 2730 - protein, 232 aa, synthetic construct
  source 1..232: note = HA-mycNLS-VL12.3-(GS)3-ZNRF1.1
MGYPYDVPDYAPAAKRVKLDGSGSGSGSQPVLTQSPSVSAAPRQRVTISVSGSNSNIGSNTVNWIQQLPGRAPELLMYDDDLLAPGVSDRFSGSRSGTSASLTISGLQSEDEADYYAATWDDSLNGWVFGGGTKVTVLSGGSGSGSGFKCPICSKSVASDEMEMHFIMCLSKPRLSYNDDVLTKDAGECVICLEELLQGDTIARLPCLCIYHKSCIDSWFEVNRSCPEHPAD

SEQ ID NO: 2731 - protein, 375 aa, synthetic construct
  source 1..375: note = HA-mycNLS-NHLRC1.1-(GS)3-INT41
MGYPYDVPDYAPAAKRVKLDGSGSGSESGPALHELMREAEISLLECKVCFEKFGHRQQRRPRNLSCGHVVCLACVAALAHPRTLALECPFCRRACRGCDTSDCLPVLHLIELLGSALRGSGSGSAEVQLVVSGGGLVKPGGSMILSCAASGFTFSNYSMNWVRQAPGKGLEWVSSISSSSEYIYYADFVKGRFTISRDNAKNSLYLQMDSLRAEDTAVYYCAWPGYRKAWGRGTLVTVSSGGGGSGGGGSGGGGSQSVLTQPASVSGSPGQSITISCAGTSSDVGGYNYVSWYQQHPGKAPKLMIYEDSKRPSGVSNRFSGSKSGNTASLTISGLRAEDEADYYCSYCASKGHWLFGGGTKLAVLGAAAEQKLIS

SEQ ID NO: 2732 - protein, 375 aa, synthetic construct
  source 1..375: note = HA-mycNLS-INT41-(GS)3-NHLRC1.1
MGYPYDVPDYAPAAKRVKLDGSGSGSAEVQLVVSGGGLVKPGGSMILSCAASGFTFSNYSMNWVRQAPGKGLEWVSSISSSSEYIYYADFVKGRFTISRDNAKNSLYLQMDSLRAEDTAVYYCAWPGYRKAWGRGTLVTVSSGGGGSGGGGSGGGGSQSVLTQPASVSGSPGQSITISCAGTSSDVGGYNYVSWYQQHPGKAPKLMIYEDSKRPSGVSNRFSGSKSGNTASLTISGLRAEDEADYYCSYCASKGHWLFGGGTKLAVLGAAAEQKLISGSGSGSESGPALHELMREAEISLLECKVCFEKFGHRQQRRPRNLSCGHVVCLACVAALAHPRTLALECPFCRRACRGCDTSDCLPVLHLIELLGSALR

SEQ ID NO: 2733 - protein, 344 aa, synthetic construct
  source 1..344: note = HA-mycNLS-RNF4.1-(GS)3-INT41
MGYPYDVPDYAPAAKRVKLDGSGSGSVSCPICMDGYSEIVQNGRLIVSTECGHVFCSQCLRDSLKNANTCPTCRKKINHKRYHPIYIGSGSGSAEVQLVVSGGGLVKPGGSMILSCAASGFTFSNYSMNWVRQAPGKGLEWVSSISSSSEYIYYADFVKGRFTISRDNAKNSLYLQMDSLRAEDTAVYYCAWPGYRKAWGRGTLVTVSSGGGGSGGGGSGGGGSQSVLTQPASVSGSPGQSITISCAGTSSDVGGYNYVSWYQQHPGKAPKLMIYEDSKRPSGVSNRFSGSKSGNTASLTISGLRAEDEADYYCSYCASKGHWLFGGGTKLAVLGAAAEQKLIS

SEQ ID NO: 2734 - protein, 344 aa, synthetic construct
  source 1..344: note = HA-mycNLS-INT4.1-(GS)3-RNF4.1
MGYPYDVPDYAPAAKRVKLDGSGSGSAEVQLVVSGGGLVKPGGSMILSCAASGFTFSNYSMNWVRQAPGKGLEWVSSISSSSEYIYYADFVKGRFTISRDNAKNSLYLQMDSLRAEDTAVYYCAWPGYRKAWGRGTLVTVSSGGGGSGGGGSGGGGSQSVLTQPASVSGSPGQSITISCAGTSSDVGGYNYVSWYQQHPGKAPKLMIYEDSKRPSGVSNRFSGSKSGNTASLTISGLRAEDEADYYCSYCASKGHWLFGGGTKLAVLGAAAEQKLISGSGSGSVSCPICMDGYSEIVQNGRLIVSTECGHVFCSQCLRDSLKNANTCPTCRKKINHKRYHPIYI

SEQ ID NO: 2735 - protein, 352 aa, synthetic construct
  source 1..352: note = HA-mycNLS-RNF12.1-(GS)3-INT41
MGYPYDVPDYAPAAKRVKLDGSGSGSGLTKEQIDNLAMRSFGENDALKTCSVCITEYTEGNKLRKLPCSHEYHVHCIDRWLSENSTCPICRRAVLGSGSGSAEVQLVVSGGGLVKPGGSMILSCAASGFTFSNYSMNWVRQAPGKGLEWVSSISSSSEYIYYADFVKGRFTISRDNAKNSLYLQMDSLRAEDTAVYYCAWPGYRKAWGRGTLVTVSSGGGGSGGGGSGGGGSQSVLTQPASVSGSPGQSITISCAGTSSDVGGYNYVSWYQQHPGKAPKLMIYEDSKRPSGVSNRFSGSKSGNTASLTISGLRAEDEADYYCSYCASKGHWLFGGGTKLAVLGAAAEQKLIS

SEQ ID NO: 2736 - protein, 361 aa, synthetic construct
  source 1..361: note = HA-mycNLS-INT41-(GS)3-RNF12.2
MGYPYDVPDYAPAAKRVKLDGSGSGSAEVQLVVSGGGLVKPGGSMILSCAASGFTFSNYSMNWVRQAPGKGLEWVSSISSSSEYIYYADFVKGRFTISRDNAKNSLYLQMDSLRAEDTAVYYCAWPGYRKAWGRGTLVTVSSGGGGSGGGGSGGGGSQSVLTQPASVSGSPGQSITISCAGTSSDVGGYNYVSWYQQHPGKAPKLMIYEDSKRPSGVSNRFSGSKSGNTASLTISGLRAEDEADYYCSYCASKGHWLFGGGTKLAVLGAAAEQKLISGSGSGSGLTKEQIDNLAMRSFGENDALKTCSVCITEYTEGNKLRKLPCSHEYHVHCIDRWLSENSTCPICRRAVLASGNRESVV

SEQ ID NO: 2737 - protein, 339 aa, synthetic construct
  source 1..339: note = HA-mycNLS-RNF182.1-(GS)3-INT41
MGYPYDVPDYAPAAKRVKLDGSGSGSECKICYNRYNLKQRKPKVLECCHRVCAKCLYKIIDFGDSPQGVIVCPFCRFETCLPGSGSGSAEVQLVVSGGGLVKPGGSMILSCAASGFTFSNYSMNWVRQAPGKGLEWVSSISSSSEYIYYADFVKGRFTISRDNAKNSLYLQMDSLRAEDTAVYYCAWPGYRKAWGRGTLVTVSSGGGGSGGGGSGGGGSQSVLTQPASVSGSPGQSITISCAGTSSDVGGYNYVSWYQQHPGKAPKLMIYEDSKRPSGVSNRFSGSKSGNTASLTISGLRAEDEADYYCSYCASKGHWLFGGGTKLAVLGAAAEQKLIS

SEQ ID NO: 2738 - protein, 339 aa, synthetic construct
  source 1..339: note = HA-mycNLS-INT41-(GS)3-RNF182.1
MGYPYDVPDYAPAAKRVKLDGSGSGSAEVQLVVSGGGLVKPGGSMILSCAASGFTFSNYSMNWVRQAPGKGLEWVSSISSSSEYIYYADFVKGRFTISRDNAKNSLYLQMDSLRAEDTAVYYCAWPGYRKAWGRGTLVTVSSGGGGSGGGGSGGGGSQSVLTQPASVSGSPGQSITISCAGTSSDVGGYNYVSWYQQHPGKAPKLMIYEDSKRPSGVSNRFSGSKSGNTASLTISGLRAEDEADYYCSYCASKGHWLFGGGTKLAVLGAAAEQKLISGSGSGSECKICYNRYNLKQRKPKVLECCHRVCAKCLYKIIDFGDSPQGVIVCPFCRFETCLP

SEQ ID NO: 2739 - protein, 353 aa, synthetic construct
  source 1..353: note = HA-mycNLS-RNF20.1-(GS)3-INT41
MGYPYDVPDYAPAAKRVKLDGSGSGSDEILMEEIKDYKARLTCPCCNMRKKDAVLTKCFHVFCFECVKTRYDTRQRKCPKCNAAFGANDFHRIYIGGSGSGSAEVQLVVSGGGLVKPGGSMILSCAASGFTFSNYSMNWVRQAPGKGLEWVSSISSSSEYIYYADFVKGRFTISRDNAKNSLYLQMDSLRAEDTAVYYCAWPGYRKAWGRGTLVTVSSGGGGSGGGGSGGGGSQSVLTQPASVSGSPGQSITISCAGTSSDVGGYNYVSWYQQHPGKAPKLMIYEDSKRPSGVSNRFSGSKSGNTASLTISGLRAEDEADYYCSYCASKGHWLFGGGTKLAVLGAAAEQKLIS

SEQ ID NO: 2740 - protein, 353 aa, synthetic construct
  source 1..353: note = HA-mycNLS-INT41-(GS)3-RNF20.1
MGYPYDVPDYAPAAKRVKLDGSGSGSAEVQLVVSGGGLVKPGGSMILSCAASGFTFSNYSMNWVRQAPGKGLEWVSSISSSSEYIYYADFVKGRFTISRDNAKNSLYLQMDSLRAEDTAVYYCAWPGYRKAWGRGTLVTVSSGGGGSGGGGSGGGGSQSVLTQPASVSGSPGQSITISCAGTSSDVGGYNYVSWYQQHPGKAPKLMIYEDSKRPSGVSNRFSGSKSGNTASLTISGLRAEDEADYYCSYCASKGHWLFGGGTKLAVLGAAAEQKLISGSGSGSDEILMEEIKDYKARLTCPCCNMRKKDAVLTKCFHVFCFECVKTRYDTRQRKCPKCNAAFGANDFHRIYIG

SEQ ID NO: 2741 - protein, 383 aa, synthetic construct
  source 1..383: note = HA-mycNLS-RNF138.1-(GS)3-INT41
MGYPYDVPDYAPAAKRVKLDGSGSGSDDFYCPVCQEVLKTPVRTTACQHVFCRKCFLTAMRESGAHCPLCRGNVTRRERACPERALDLENIMRKFSGSCRCCAKQIKFYRMRHHYKSCKKYQDEYGGSGSGSAEVQLVVSGGGLVKPGGSMILSCAASGFTFSNYSMNWVRQAPGKGLEWVSSISSSSEYIYYADFVKGRFTISRDNAKNSLYLQMDSLRAEDTAVYYCAWPGYRKAWGRGTLVTVSSGGGGSGGGGSGGGGSQSVLTQPASVSGSPGQSITISCAGTSSDVGGYNYVSWYQQHPGKAPKLMIYEDSKRPSGVSNRFSGSKSGNTASLTISGLRAEDEADYYCSYCASKGHWLFGGGTKLAVLGAAAEQKLIS

SEQ ID NO: 2742 - protein, 383 aa, synthetic construct
  source 1..383: note = HA-mycNLS-INT41-(GS)3-RNF138.1
MGYPYDVPDYAPAAKRVKLDGSGSGSAEVQLVVSGGGLVKPGGSMILSCAASGFTFSNYSMNWVRQAPGKGLEWVSSISSSSEYIYYADFVKGRFTISRDNAKNSLYLQMDSLRAEDTAVYYCAWPGYRKAWGRGTLVTVSSGGGGSGGGGSGGGGSQSVLTQPASVSGSPGQSITISCAGTSSDVGGYNYVSWYQQHPGKAPKLMIYEDSKRPSGVSNRFSGSKSGNTASLTISGLRAEDEADYYCSYCASKGHWLFGGGTKLAVLGAAAEQKLISGSGSGSDDFYCPVCQEVLKTPVRTTACQHVFCRKCFLTAMRESGAHCPLCRGNVTRRERACPERALDLENIMRKFSGSCRCCAKQIKFYRMRHHYKSCKKYQDEYG

SEQ ID NO: 2743 - protein, 335 aa, synthetic construct
  source 1..335: note = HA-mycNLS-RNF128.1-(GS)3-INT41
MGYPYDVPDYAPAAKRVKLDGSGSGSDSCAVCIELYKPNDLVRILTCNHIFHKTCVDPWLLEHRTCPMCKCDILKALGGSGSGSAEVQLVVSGGGLVKPGGSMILSCAASGFTFSNYSMNWVRQAPGKGLEWVSSISSSSEYIYYADFVKGRFTISRDNAKNSLYLQMDSLRAEDTAVYYCAWPGYRKAWGRGTLVTVSSGGGGSGGGGSGGGGSQSVLTQPASVSGSPGQSITISCAGTSSDVGGYNYVSWYQQHPGKAPKLMIYEDSKRPSGVSNRFSGSKSGNTASLTISGLRAEDEADYYCSYCASKGHWLFGGGTKLAVLGAAAEQKLIS

SEQ ID NO: 2744 - protein, 335 aa, synthetic construct
  source 1..335: note = HA-mycNLS-INT41-(GS)3-RNF128.1
MGYPYDVPDYAPAAKRVKLDGSGSGSAEVQLVVSGGGLVKPGGSMILSCAASGFTFSNYSMNWVRQAPGKGLEWVSSISSSSEYIYYADFVKGRFTISRDNAKNSLYLQMDSLRAEDTAVYYCAWPGYRKAWGRGTLVTVSSGGGGSGGGGSGGGGSQSVLTQPASVSGSPGQSITISCAGTSSDVGGYNYVSWYQQHPGKAPKLMIYEDSKRPSGVSNRFSGSKSGNTASLTISGLRAEDEADYYCSYCASKGHWLFGGGTKLAVLGAAAEQKLISGSGSGSDSCAVCIELYKPNDLVRILTCNHIFHKTCVDPWLLEHRTCPMCKCDILKALG

SEQ ID NO: 2745 - protein, 369 aa, synthetic construct
  source 1..369: note = HA-mycNLS-ZNRF1.1-(GS)3-INT41
MGYPYDVPDYAPAAKRVKLDGSGSGSGFKCPICSKSVASDEMEMHFIMCLSKPRLSYNDDVLTKDAGECVICLEELLQGDTIARLPCLCIYHKSCIDSWFEVNRSCPEHPADGSGSGSAEVQLVVSGGGLVKPGGSMILSCAASGFTFSNYSMNWVRQAPGKGLEWVSSISSSSEYIYYADFVKGRFTISRDNAKNSLYLQMDSLRAEDTAVYYCAWPGYRKAWGRGTLVTVSSGGGGSGGGGSGGGGSQSVLTQPASVSGSPGQSITISCAGTSSDVGGYNYVSWYQQHPGKAPKLMIYEDSKRPSGVSNRFSGSKSGNTASLTISGLRAEDEADYYCSYCASKGHWLFGGGTKLAVLGAAAEQKLIS

SEQ ID NO: 2746 - protein, 369 aa, synthetic construct
  source 1..369: note = HA-mycNLS-INT41-(GS)3-ZNRF1.1
MGYPYDVPDYAPAAKRVKLDGSGSGSAEVQLVVSGGGLVKPGGSMILSCAASGFTFSNYSMNWVRQAPGKGLEWVSSISSSSEYIYYADFVKGRFTISRDNAKNSLYLQMDSLRAEDTAVYYCAWPGYRKAWGRGTLVTVSSGGGGSGGGGSGGGGSQSVLTQPASVSGSPGQSITISCAGTSSDVGGYNYVSWYQQHPGKAPKLMIYEDSKRPSGVSNRFSGSKSGNTASLTISGLRAEDEADYYCSYCASKGHWLFGGGTKLAVLGAAAEQKLISGSGSGSGFKCPICSKSVASDEMEMHFIMCLSKPRLSYNDDVLTKDAGECVICLEELLQGDTIARLPCLCIYHKSCIDSWFEVNRSCPEHPAD

SEQ ID NO: 2747 - protein, 293 aa, synthetic construct; identical to SEQ ID NO: 246
  source 1..293: note = OMOMYC-(GS)1-CHIP.1-mycNLS-HA

SEQ ID NO: 2748 - protein, 295 aa, synthetic construct; identical to SEQ ID NO: 247
  source 1..295: note = OMOMYC-(GS)2-CHIP.1-mycNLS-HA

SEQ ID NO: 2749 - protein, 297 aa, synthetic construct; identical to SEQ ID NO: 248
  source 1..297: note = OMOMYC-(GS)3-CHIP.1-mycNLS-HA

SEQ ID NO: 2750 - protein, 299 aa, synthetic construct; identical to SEQ ID NO: 249
  source 1..299: note = OMOMYC-(GS)4-CHIP.1-mycNLS-HA

SEQ ID NO: 2751 - protein, 301 aa, synthetic construct; identical to SEQ ID NO: 250
  source 1..301: note = OMOMYC-(GS)5-CHIP.1-mycNLS-HA

SEQ ID NO: 2752 - protein, 303 aa, synthetic construct; identical to SEQ ID NO: 251
  source 1..303: note = OMOMYC-(GS)6-CHIP.1-mycNLS-HA

SEQ ID NO: 2753 - protein, 154 aa, synthetic construct; identical to SEQ ID NO: 258
  source 1..154: note = HA-mycNLS-DCAF1.1-(GS)1-OMOMYC

SEQ ID NO: 2754 - protein, 156 aa, synthetic construct; identical to SEQ ID NO: 259
  source 1..156: note = HA-mycNLS-DCAF1.1-(GS)2-OMOMYC

SEQ ID NO: 2755 - protein, 158 aa, synthetic construct; identical to SEQ ID NO: 260
  source 1..158: note = HA-mycNLS-DCAF1.1-(GS)3-OMOMYC

SEQ ID NO: 2756 - protein, 160 aa, synthetic construct; identical to SEQ ID NO: 261
  source 1..160: note = HA-mycNLS-DCAF1.1-(GS)4-OMOMYC

SEQ ID NO: 2757 - protein, 162 aa, synthetic construct; identical to SEQ ID NO: 262
  source 1..162: note = HA-mycNLS-DCAF1.1-(GS)5-OMOMYC

SEQ ID NO: 2758 - protein, 164 aa, synthetic construct; identical to SEQ ID NO: 263
  source 1..164: note = HA-mycNLS-DCAF1.1-(GS)6-OMOMYC

SEQ ID NO: 2759 - protein, 475 aa, synthetic construct; identical to SEQ ID NO: 270
  source 1..475: note = HA-mycNLS-OMOMYC-(GS)1-E6AP.1

SEQ ID NO: 2760 - protein, 477 aa, synthetic construct; identical to SEQ ID NO: 271
  source 1..477: note = HA-mycNLS-OMOMYC-(GS)2-E6AP.1

SEQ ID NO: 2761 - protein, 479 aa, synthetic construct; identical to SEQ ID NO: 272
  source 1..479: note = HA-mycNLS-OMOMYC-(GS)3-E6AP.1

SEQ ID NO: 2762 - protein, 481 aa, synthetic construct; identical to SEQ ID NO: 273
  source 1..481: note = HA-mycNLS-OMOMYC-(GS)4-E6AP.1

SEQ ID NO: 2763 - protein, 483 aa, synthetic construct; identical to SEQ ID NO: 274
  source 1..483: note = HA-mycNLS-OMOMYC-(GS)5-E6AP.1

SEQ ID NO: 2764 - protein, 485 aa, synthetic construct; identical to SEQ ID NO: 275
  source 1..485: note = HA-mycNLS-OMOMYC-(GS)6-E6AP.1

SEQ ID NO: 2765 - protein, 471 aa, synthetic construct; identical to SEQ ID NO: 282
  source 1..471: note = HA-FBXW7a.1-(GS)1-OMOMYC

SEQ ID NO: 2766 - protein, 473 aa, synthetic construct; identical to SEQ ID NO: 283
  source 1..473: note = HA-FBXW7a.1-(GS)2-OMOMYC

SEQ ID NO: 2767 - protein, 475 aa, synthetic construct; identical to SEQ ID NO: 284
  source 1..475: note = HA-FBXW7a.1-(GS)3-OMOMYC

SEQ ID NO: 2768 - protein, 477 aa, synthetic construct; identical to SEQ ID NO: 285
  source 1..477: note = HA-FBXW7a.1-(GS)4-OMOMYC

SEQ ID NO: 2769 - protein, 479 aa, synthetic construct; identical to SEQ ID NO: 286
  source 1..479: note = HA-FBXW7a.1-(GS)5-OMOMYC

SEQ ID NO: 2770 - protein, 481 aa, synthetic construct; identical to SEQ ID NO: 287
  source 1..481: note = HA-FBXW7a.1-(GS)6-OMOMYC

SEQ ID NO: 2771 - protein, 440 aa, synthetic construct; identical to SEQ ID NO: 294
  source 1..440: note = HA-mycNLS-Keap1.1-(GS)1-OMOMYC

SEQ ID NO: 2772 - protein, 442 aa, synthetic construct; identical to SEQ ID NO: 295
  source 1..442: note = HA-mycNLS-Keap1.1-(GS)2-OMOMYC

SEQ ID NO: 2773 - protein, 444 aa, synthetic construct; identical to SEQ ID NO: 296
  source 1..444: note = HA-mycNLS-Keap1.1-(GS)3-OMOMYC

SEQ ID NO: 2774 - protein, 446 aa, synthetic construct; identical to SEQ ID NO: 297
  source 1..446: note = HA-mycNLS-Keap1.1-(GS)4-OMOMYC

SEQ ID NO: 2775 - protein, 448 aa, synthetic construct; identical to SEQ ID NO: 298
  source 1..448: note = HA-mycNLS-Keap1.1-(GS)5-OMOMYC

SEQ ID NO: 2776 - protein, 450 aa, synthetic construct; identical to SEQ ID NO: 299
  source 1..450: note = HA-mycNLS-Keap1.1-(GS)6-OMOMYC

SEQ ID NO: 2777 - protein, 246 aa, synthetic construct; identical to SEQ ID NO: 306
  source 1..246: note = HA-mycNLS-RNF125.1-(GS)1-OMOMYC

SEQ ID NO: 2778 - protein, 248 aa, synthetic construct; identical to SEQ ID NO: 307
  source 1..248: note = HA-mycNLS-RNF125.1-(GS)2-OMOMYC

SEQ ID NO: 2779 - protein, 250 aa, synthetic construct; identical to SEQ ID NO: 308
  source 1..250: note = HA-mycNLS-RNF125.1-(GS)3-OMOMYC

SEQ ID NO: 2780 - protein, 252 aa, synthetic construct; identical to SEQ ID NO: 309
  source 1..252: note = HA-mycNLS-RNF125.1-(GS)4-OMOMYC

SEQ ID NO: 2781 - protein, 254 aa, synthetic construct; identical to SEQ ID NO: 310
  source 1..254: note = HA-mycNLS-RNF125.1-(GS)5-OMOMYC

SEQ ID NO: 2782 - protein, 256 aa, synthetic construct; identical to SEQ ID NO: 311
  source 1..256: note = HA-mycNLS-RNF125.1-(GS)6-OMOMYC

SEQ ID NO: 2783 - protein, 345 aa, synthetic construct; identical to SEQ ID NO: 318
  source 1..345: note = OMOMYC-(GS)1-SPOP.1-mycNLS-HA

SEQ ID NO: 2784 - protein, 347 aa, synthetic construct; identical to SEQ ID NO: 319
  source 1..347: note = OMOMYC-(GS)2-SPOP.1-mycNLS-HA

SEQ ID NO: 2785 - protein, 349 aa, synthetic construct; identical to SEQ ID NO: 320
  source 1..349: note = OMOMYC-(GS)3-SPOP.1-mycNLS-HA

SEQ ID NO: 2786 - protein, 351 aa, synthetic construct; identical to SEQ ID NO: 321
  source 1..351: note = OMOMYC-(GS)4-SPOP.1-mycNLS-HA

SEQ ID NO: 2787 - protein, 354 aa, synthetic construct; identical to SEQ ID NO: 322
  source 1..354: note = OMOMYC-(GS)5-SPOP.1-mycNLS-HA

SEQ ID NO: 2788 - protein, 355 aa, synthetic construct; identical to SEQ ID NO: 323
  source 1..355: note = OMOMYC-(GS)6-SPOP.1-mycNLS-HA

SEQ ID NO: 2789 - protein, 159 aa, synthetic construct
  source 1..159: note = OMOMYC-(GS)1-VIF.1-mycNLS-HA
MSDTEENVKRRTHNVLERQRRNELKRSFFALRDQIPELENNEKAPKVVILKKATAYILSVQAETQKLISEIDLLRKQNEQLKHKLEQLRNSCAGSSESAIRNTILGRIVSPRCEYQAGHNKVGSLQYLALAALIKPKGSGSPAAKRVKLDYPYDVPDYA

SEQ ID NO: 2790 - protein, 161 aa, synthetic construct
  source 1..161: note = OMOMYC-(GS)2-VIF.1-mycNLS-HA
MSDTEENVKRRTHNVLERQRRNELKRSFFALRDQIPELENNEKAPKVVILKKATAYILSVQAETQKLISEIDLLRKQNEQLKHKLEQLRNSCAGSGSSESAIRNTILGRIVSPRCEYQAGHNKVGSLQYLALAALIKPKGSGSPAAKRVKLDYPYDVPDYA

SEQ ID NO: 2791 - protein, 163 aa, synthetic construct
  source 1..163: note = OMOMYC-(GS)3-VIF.1-mycNLS-HA
MSDTEENVKRRTHNVLERQRRNELKRSFFALRDQIPELENNEKAPKVVILKKATAYILSVQAETQKLISEIDLLRKQNEQLKHKLEQLRNSCAGSGSGSSESAIRNTILGRIVSPRCEYQAGHNKVGSLQYLALAALIKPKGSGSPAAKRVKLDYPYDVPDYA

SEQ ID NO: 2792 - protein, 165 aa, synthetic construct
  source 1..165: note = OMOMYC-(GS)4-VIF.1-mycNLS-HA
MSDTEENVKRRTHNVLERQRRNELKRSFFALRDQIPELENNEKAPKVVILKKATAYILSVQAETQKLISEIDLLRKQNEQLKHKLEQLRNSCAGSGSGSGSSESAIRNTILGRIVSPRCEYQAGHNKVGSLQYLALAALIKPKGSGSPAAKRVKLDYPYDVPDYA

SEQ ID NO: 2793 - protein, 167 aa, synthetic construct
  source 1..167: note = OMOMYC-(GS)5-VIF.1-mycNLS-HA
MSDTEENVKRRTHNVLERQRRNELKRSFFALRDQIPELENNEKAPKVVILKKATAYILSVQAETQKLISEIDLLRKQNEQLKHKLEQLRNSCAGSGSGSGSGSSESAIRNTILGRIVSPRCEYQAGHNKVGSLQYLALAALIKPKGSGSPAAKRVKLDYPYDVPDYA

SEQ ID NO: 2794 - protein, 169 aa, synthetic construct
  source 1..169: note = OMOMYC-(GS)6-VIF.1-mycNLS-HA
MSDTEENVKRRTHNVLERQRRNELKRSFFALRDQIPELENNEKAPKVVILKKATAYILSVQAETQKLISEIDLLRKQNEQLKHKLEQLRNSCAGSGSGSGSGSGSSESAIRNTILGRIVSPRCEYQAGHNKVGSLQYLALAALIKPKGSGSPAAKRVKLDYPYDVPDYA

SEQ ID NO: 2795 - protein, 526 aa, synthetic construct
  source 1..526: note = HA-3xsvNLS-FBXW7a.1-(GGGS)1-mycV.3700
MGYPYDVPDYAPKKKRKVQPKKKRKVQPKKKRKVNQELLSVGSKRRRTGGSLRGNPSSSQVDEEQMNRVVEEEQQQQLRQQEEEHTARNGEVVGVEPRPGGQNDSQQGQLEENNNRFISVDEDSSGNQEEQEEDEEHAGEQDEEDEEEEEMDQESDDFDQSDDSSREDEHTHTNSVTNSSSIVDLPVHQLSSPFYTKTTKMKRKLDHGSEVRSFSLGKKPCKVSEYTSTTGLVPCSATPTTFGDLRAANGQGQQRRRITSVQPPTGLQEWLKMFQSWSGPEKLLALDELIDSCEPTQVKHMMQVIEPQFQRDFISLLPKELALYVLSFLEPKDLLQAAQTCRYWRILAEDNLLWREKCKEEGIDEPLHIKRRKVIKPGFIHSPWKSAYIRQHRIDTNSRRGGGGSEVQLLESGGGLVQPGGSLRLSAAASGFTFDVSDMGWFRQAPGKEREGVSAIGTEGDTYYADSVKGRFTISRDNSKNTLYLQMNSLRAEDTAVYYAAILPGELSLGNEYDYWGQGTQVTVSS

SEQ ID NO: 2796 - protein, 530 aa, synthetic construct
  source 1..530: note = HA-3xsvNLS-FBXW7a.1-(GGGS)2-mycV.3700
MGYPYDVPDYAPKKKRKVQPKKKRKVQPKKKRKVNQELLSVGSKRRRTGGSLRGNPSSSQVDEEQMNRVVEEEQQQQLRQQEEEHTARNGEVVGVEPRPGGQNDSQQGQLEENNNRFISVDEDSSGNQEEQEEDEEHAGEQDEEDEEEEEMDQESDDFDQSDDSSREDEHTHTNSVTNSSSIVDLPVHQLSSPFYTKTTKMKRKLDHGSEVRSFSLGKKPCKVSEYTSTTGLVPCSATPTTFGDLRAANGQGQQRRRITSVQPPTGLQEWLKMFQSWSGPEKLLALDELIDSCEPTQVKHMMQVIEPQFQRDFISLLPKELALYVLSFLEPKDLLQAAQTCRYWRILAEDNLLWREKCKEEGIDEPLHIKRRKVIKPGFIHSPWKSAYIRQHRIDTNSRRGGGGSGGGSEVQLLESGGGLVQPGGSLRLSAAASGFTFDVSDMGWFRQAPGKEREGVSAIGTEGDTYYADSVKGRFTISRDNSKNTLYLQMNSLRAEDTAVYYAAILPGELSLGNEYDYWGQGTQVTVSS

SEQ ID NO: 2797 - protein, 523 aa, synthetic construct
  source 1..523: note = HA-nlpsvNLS-FBXW7a.1-(GGGS)1-mycV.3700
MGYPYDVPDYAAVKRPAATKKAGQAKKKKLDNQELLSVGSKRRRTGGSLRGNPSSSQVDEEQMNRVVEEEQQQQLRQQEEEHTARNGEVVGVEPRPGGQNDSQQGQLEENNNRFISVDEDSSGNQEEQEEDEEHAGEQDEEDEEEEEMDQESDDFDQSDDSSREDEHTHTNSVTNSSSIVDLPVHQLSSPFYTKTTKMKRKLDHGSEVRSFSLGKKPCKVSEYTSTTGLVPCSATPTTFGDLRAANGQGQQRRRITSVQPPTGLQEWLKMFQSWSGPEKLLALDELIDSCEPTQVKHMMQVIEPQFQRDFISLLPKELALYVLSFLEPKDLLQAAQTCRYWRILAEDNLLWREKCKEEGIDEPLHIKRRKVIKPGFIHSPWKSAYIRQHRIDTNSRRGGGGSEVQLLESGGGLVQPGGSLRLSAAASGFTFDVSDMGWFRQAPGKEREGVSAIGTEGDTYYADSVKGRFTISRDNSKNTLYLQMNSLRAEDTAVYYAAILPGELSLGNEYDYWGQGTQVTVSS

SEQ ID NO: 2798 - protein, 527 aa, synthetic construct
  source 1..527: note = HA-nlpNLS-FBXW7a.1-(GGGS)2-mycV.3700
MGYPYDVPDYAAVKRPAATKKAGQAKKKKLDNQELLSVGSKRRRTGGSLRGNPSSSQVDEEQMNRVVEEEQQQQLRQQEEEHTARNGEVVGVEPRPGGQNDSQQGQLEENNNRFISVDEDSSGNQEEQEEDEEHAGEQDEEDEEEEEMDQESDDFDQSDDSSREDEHTHTNSVTNSSSIVDLPVHQLSSPFYTKTTKMKRKLDHGSEVRSFSLGKKPCKVSEYTSTTGLVPCSATPTTFGDLRAANGQGQQRRRITSVQPPTGLQEWLKMFQSWSGPEKLLALDELIDSCEPTQVKHMMQVIEPQFQRDFISLLPKELALYVLSFLEPKDLLQAAQTCRYWRILAEDNLLWREKCKEEGIDEPLHIKRRKVIKPGFIHSPWKSAYIRQHRIDTNSRRGGGGSGGGSEVQLLESGGGLVQPGGSLRLSAAASGFTFDVSDMGWFRQAPGKEREGVSAIGTEGDTYYADSVKGRFTISRDNSKNTLYLQMNSLRAEDTAVYYAAILPGELSLGNEYDYWGQGTQVTVSS

SEQ ID NO: 2799 - protein, 373 aa, synthetic construct
  source 1..373: note = HA-3xsvNLS-mycV.3700-(GGGS)1-SPOP.2
MGYPYDVPDYAPKKKRKVQPKKKRKVQPKKKRKVGSGSGSEVQLLESGGGLVQPGGSLRLSAAASGFTFDVSDMGWFRQAPGKEREGVSAIGTEGDTYYADSVKGRFTISRDNSKNTLYLQMNSLRAEDTAVYYAAILPGELSLGNEYDYWGQGTQVTVSSGGGSSVNISGQNTMNMVKVPECRLADELGGLWENSRFTDCCLCVAGQEFQAHKAILAARSPVFSAMFEHEMEESKKNRVEINDVEPEVFKEMMCFIYTGKAPNLDKMADDLLAAADKYALERLKVMCEDALCSNLSVENAAEILILADLHSADQLKTQAVDFINYHASDVLETSGWKSMVVSHPHLVAEAYRSLASAQCPFLGPPRKRLKQS

SEQ ID NO: 2800 - protein, 377 aa, synthetic construct
  source 1..377: note = HA-3xsvNLS-mycV.3700-(GGGS)2-SPOP.2
MGYPYDVPDYAPKKKRKVQPKKKRKVQPKKKRKVGSGSGSEVQLLESGGGLVQPGGSLRLSAAASGFTFDVSDMGWFRQAPGKEREGVSAIGTEGDTYYADSVKGRFTISRDNSKNTLYLQMNSLRAEDTAVYYAAILPGELSLGNEYDYWGQGTQVTVSSGGGSGGGSSVNISGQNTMNMVKVPECRLADELGGLWENSRFTDCCLCVAGQEFQAHKAILAARSPVFSAMFEHEMEESKKNRVEINDVEPEVFKEMMCFIYTGKAPNLDKMADDLLAAADKYALERLKVMCEDALCSNLSVENAAEILILADLHSADQLKTQAVDFINYHASDVLETSGWKSMVVSHPHLVAEAYRSLASAQCPFLGPPRKRLKQS

SEQ ID NO: 2801 - protein, 370 aa, synthetic construct
  source 1..370: note = HA-nlpNLS-mycV.3700-(GGGS)-SPOP.2
MGYPYDVPDYAAVKRPAATKKAGQAKKKKLDGSGSGSEVQLLESGGGLVQPGGSLRLSAAASGFTFDVSDMGWFRQAPGKEREGVSAIGTEGDTYYADSVKGRFTISRDNSKNTLYLQMNSLRAEDTAVYYAAILPGELSLGNEYDYWGQGTQVTVSSGGGSSVNISGQNTMNMVKVPECRLADELGGLWENSRFTDCCLCVAGQEFQAHKAILAARSPVFSAMFEHEMEESKKNRVEINDVEPEVFKEMMCFIYTGKAPNLDKMADDLLAAADKYALERLKVMCEDALCSNLSVENAAEILILADLHSADQLKTQAVDFINYHASDVLETSGWKSMVVSHPHLVAEAYRSLASAQCPFLGPPRKRLKQS

SEQ ID NO: 2802 - protein, 374 aa, synthetic construct
  source 1..374: note = HA-nlpNLS-mycV.3700-(GGGS)2-SPOP.2
MGYPYDVPDYAAVKRPAATKKAGQAKKKKLDGSGSGSEVQLLESGGGLVQPGGSLRLSAAASGFTFDVSDMGWFRQAPGKEREGVSAIGTEGDTYYADSVKGRFTISRDNSKNTLYLQMNSLRAEDTAVYYAAILPGELSLGNEYDYWGQGTQVTVSSGGGSGGGSSVNISGQNTMNMVKVPECRLADELGGLWENSRFTDCCLCVAGQEFQAHKAILAARSPVFSAMFEHEMEESKKNRVEINDVEPEVFKEMMCFIYTGKAPNLDKMADDLLAAADKYALERLKVMCEDALCSNLSVENAAEILILADLHSADQLKTQAVDFINYHASDVLETSGWKSMVVSHPHLVAEAYRSLASAQCPFLGPPRKRLKQS

SEQ ID NO: 2803 - protein, 261 aa, synthetic construct
  source 1..261: note = HA-3xsvNLS-RNF125.2-(GGGS)1-mycV.3700
MGYPYDVPDYAPKKKRKVQPKKKRKVQPKKKRKVGSGSGSTSFDCAVCLEVLHQPVRTRCGHVFCRSCIATSLKNNKWTCPYCRAYLPSEGVPATDVAKRMKSEYKNCAECDTLVCLSEMRAHIRTCQKYIDKYGPGGGSEVQLLESGGGLVQPGGSLRLSAAASGFTFDVSDMGWFRQAPGKEREGVSAIGTEGDTYYADSVKGRFTISRDNSKNTLYLQMNSLRAEDTAVYYAAILPGELSLGNEYDYWGQGTQVTVSS

SEQ ID NO: 2804 - protein, 265 aa, synthetic construct
  source 1..265: note = HA-3xsvNLS-RNF125.2-(GGGS)2-mycV.3700
MGYPYDVPDYAPKKKRKVQPKKKRKVQPKKKRKVGSGSGSTSFDCAVCLEVLHQPVRTRCGHVFCRSCIATSLKNNKWTCPYCRAYLPSEGVPATDVAKRMKSEYKNCAECDTLVCLSEMRAHIRTCQKYIDKYGPGGGSGGGSEVQLLESGGGLVQPGGSLRLSAAASGFTFDVSDMGWFRQAPGKEREGVSAIGTEGDTYYADSVKGRFTISRDNSKNTLYLQMNSLRAEDTAVYYAAILPGELSLGNEYDYWGQGTQVTVSS

SEQ ID NO: 2805 - protein, 258 aa, synthetic construct
  source 1..258: note = HA-nlpNLS-RNF125.2-(GGGS)1-mycV.3700
MGYPYDVPDYAAVKRPAATKKAGQAKKKKLDGSGSGSTSFDCAVCLEVLHQPVRTRCGHVFCRSCIATSLKNNKWTCPYCRAYLPSEGVPATDVAKRMKSEYKNCAECDTLVCLSEMRAHIRTCQKYIDKYGPGGGSEVQLLESGGGLVQPGGSLRLSAAASGFTFDVSDMGWFRQAPGKEREGVSAIGTEGDTYYADSVKGRFTISRDNSKNTLYLQMNSLRAEDTAVYYAAILPGELSLGNEYDYWGQGTQVTVSS

SEQ ID NO: 2806 - protein, 262 aa, synthetic construct
  source 1..262: note = HA-nlpNLS-RNF125.2-(GGGS)2-mycV.3700
MGYPYDVPDYAAVKRPAATKKAGQAKKKKLDGSGSGSTSFDCAVCLEVLHQPVRTRCGHVFCRSCIATSLKNNKWTCPYCRAYLPSEGVPATDVAKRMKSEYKNCAECDTLVCLSEMRAHIRTCQKYIDKYGPGGGSGGGSEVQLLESGGGLVQPGGSLRLSAAASGFTFDVSDMGWFRQAPGKEREGVSAIGTEGDTYYADSVKGRFTISRDNSKNTLYLQMNSLRAEDTAVYYAAILPGELSLGNEYDYWGQGTQVTVSS

SEQ ID NO: 2807 - protein, 207 aa, synthetic construct
  source 1..207: note = HA-3xsvNLS-mycV.3700-(GGGS)1-VIF.1
MGYPYDVPDYAPKKKRKVQPKKKRKVQPKKKRKVGSGSGSEVQLLESGGGLVQPGGSLRLSAAASGFTFDVSDMGWFRQAPGKEREGVSAIGTEGDTYYADSVKGRFTISRDNSKNTLYLQMNSLRAEDTAVYYAAILPGELSLGNEYDYWGQGTQVTVSSGGGSSESAIRNTILGRIVSPRCEYQAGHNKVGSLQYLALAALIKPK

SEQ ID NO: 2808 - protein, 211 aa, synthetic construct
  source 1..211: note = HA-3xsvNLS-mycV.3700-(GGGS)2-VIF.1
MGYPYDVPDYAPKKKRKVQPKKKRKVQPKKKRKVGSGSGSEVQLLESGGGLVQPGGSLRLSAAASGFTFDVSDMGWFRQAPGKEREGVSAIGTEGDTYYADSVKGRFTISRDNSKNTLYLQMNSLRAEDTAVYYAAILPGELSLGNEYDYWGQGTQVTVSSGGGSGGGSSESAIRNTILGRIVSPRCEYQAGHNKVGSLQYLALAALIKPK

SEQ ID NO: 2809 - protein, 204 aa, synthetic construct
  source 1..204: note = HA-nlpNLS-mycV.3700-(GGGS)1-VIF.1
MGYPYDVPDYAAVKRPAATKKAGQAKKKKLDGSGSGSEVQLLESGGGLVQPGGSLRLSAAASGFTFDVSDMGWFRQAPGKEREGVSAIGTEGDTYYADSVKGRFTISRDNSKNTLYLQMNSLRAEDTAVYYAAILPGELSLGNEYDYWGQGTQVTVSSGGGSSESAIRNTILGRIVSPRCEYQAGHNKVGSLQYLALAALIKPK

SEQ ID NO: 2810 - protein, 208 aa, synthetic construct
  source 1..208: note = HA-nlpNLS-mycV.3700-(GGGS)2-VIF.1
MGYPYDVPDYAAVKRPAATKKAGQAKKKKLDGSGSGSEVQLLESGGGLVQPGGSLRLSAAASGFTFDVSDMGWFRQAPGKEREGVSAIGTEGDTYYADSVKGRFTISRDNSKNTLYLQMNSLRAEDTAVYYAAILPGELSLGNEYDYWGQGTQVTVSSGGGSGGGSSESAIRNTILGRIVSPRCEYQAGHNKVGSLQYLALAALIKPK

SEQ ID NO: 2811 - protein, 527 aa, synthetic construct
  source 1..527: note = HA-3xsvNLS-FBXW7a.1-(GGGS)1-mycV.1300
MGYPYDVPDYAPKKKRKVQPKKKRKVQPKKKRKVNQELLSVGSKRRRTGGSLRGNPSSSQVDEEQMNRVVEEEQQQQLRQQEEEHTARNGEVVGVEPRPGGQNDSQQGQLEENNNRFISVDEDSSGNQEEQEEDEEHAGEQDEEDEEEEEMDQESDDFDQSDDSSREDEHTHTNSVTNSSSIVDLPVHQLSSPFYTKTTKMKRKLDHGSEVRSFSLGKKPCKVSEYTSTTGLVPCSATPTTFGDLRAANGQGQQRRRITSVQPPTGLQEWLKMFQSWSGPEKLLALDELIDSCEPTQVKHMMQVIEPQFQRDFISLLPKELALYVLSFLEPKDLLQAAQTCRYWRILAEDNLLWREKCKEEGIDEPLHIKRRKVIKPGFIHSPWKSAYIRQHRIDTNSRRGGGGSEVQLLESGGGLVQPGGSLRLSAAASGFTFGDADMGWFRQAPGKEREGVSAISASGDSTYYADSVKGRFTISRDNSKNTLYLQMNSLRAEDTAVYYAAHLDQELTGASEHDYWGRGTQVTVSS

SEQ ID NO: 2812 - protein, 531 aa, synthetic construct
  source 1..531: note = HA-3xsvNLS-FBXW7a.1-(GGGS)2-mycV.1300
MGYPYDVPDYAPKKKRKVQPKKKRKVQPKKKRKVNQELLSVGSKRRRTGGSLRGNPSSSQVDEEQMNRVVEEEQQQQLRQQEEEHTARNGEVVGVEPRPGGQNDSQQGQLEENNNRFISVDEDSSGNQEEQEEDEEHAGEQDEEDEEEEEMDQESDDFDQSDDSSREDEHTHTNSVTNSSSIVDLPVHQLSSPFYTKTTKMKRKLDHGSEVRSFSLGKKPCKVSEYTSTTGLVPCSATPTTFGDLRAANGQGQQRRRITSVQPPTGLQEWLKMFQSWSGPEKLLALDELIDSCEPTQVKHMMQVIEPQFQRDFISLLPKELALYVLSFLEPKDLLQAAQTCRYWRILAEDNLLWREKCKEEGIDEPLHIKRRKVIKPGFIHSPWKSAYIRQHRIDTNSRRGGGGSGGGSEVQLLESGGGLVQPGGSLRLSAAASGFTFGDADMGWFRQAPGKEREGVSAISASGDSTYYADSVKGRFTISRDNSKNTLYLQMNSLRAEDTAVYYAAHLDQELTGASEHDYWGRGTQVTVSS

SEQ ID NO: 2813 - protein, 524 aa, synthetic construct
  source 1..524: note = HA-nlpsvNLS-FBXW7a.1-(GGGS)-mycV.1300
MGYPYDVPDYAAVKRPAATKKAGQAKKKKLDNQELLSVGSKRRRTGGSLRGNPSSSQVDEEQMNRVVEEEQQQQLRQQEEEHTARNGEVVGVEPRPGGQNDSQQGQLEENNNRFISVDEDSSGNQEEQEEDEEHAGEQDEEDEEEEEMDQESDDFDQSDDSSREDEHTHTNSVTNSSSIVDLPVHQLSSPFYTKTTKMKRKLDHGSEVRSFSLGKKPCKVSEYTSTTGLVPCSATPTTFGDLRAANGQGQQRRRITSVQPPTGLQEWLKMFQSWSGPEKLLALDELIDSCEPTQVKHMMQVIEPQFQRDFISLLPKELALYVLSFLEPKDLLQAAQTCRYWRILAEDNLLWREKCKEEGIDEPLHIKRRKVIKPGFIHSPWKSAYIRQHRIDTNSRRGGGGSEVQLLESGGGLVQPGGSLRLSAAASGFTFGDADMGWFRQAPGKEREGVSAISASGDSTYYADSVKGRFTISRDNSKNTLYLQMNSLRAEDTAVYYAAHLDQELTGASEHDYWGRGTQVTVSS

SEQ ID NO: 2814 - protein, 528 aa, synthetic construct
  source 1..528: note = HA-nlpNLS-FBXW7a.1-(GGGS)2-mycV.1300
MGYPYDVPDYAAVKRPAATKKAGQAKKKKLDNQELLSVGSKRRRTGGSLRGNPSSSQVDEEQMNRVVEEEQQQQLRQQEEEHTARNGEVVGVEPRPGGQNDSQQGQLEENNNRFISVDEDSSGNQEEQEEDEEHAGEQDEEDEEEEEMDQESDDFDQSDDSSREDEHTHTNSVTNSSSIVDLPVHQLSSPFYTKTTKMKRKLDHGSEVRSFSLGKKPCKVSEYTSTTGLVPCSATPTTFGDLRAANGQGQQRRRITSVQPPTGLQEWLKMFQSWSGPEKLLALDELIDSCEPTQVKHMMQVIEPQFQRDFISLLPKELALYVLSFLEPKDLLQAAQTCRYWRILAEDNLLWREKCKEEGIDEPLHIKRRKVIKPGFIHSPWKSAYIRQHRIDTNSRRGGGGSGGGSEVQLLESGGGLVQPGGSLRLSAAASGFTFGDADMGWFRQAPGKEREGVSAISASGDSTYYADSVKGRFTISRDNSKNTLYLQMNSLRAEDTAVYYAAHLDQELTGASEHDYWGRGTQVTVSS

SEQ ID NO: 2815 - protein, 374 aa, synthetic construct
  source 1..374: note = HA-3xsvNLS-mycV.1300-(GGGS)1-SPOP.2
MGYPYDVPDYAPKKKRKVQPKKKRKVQPKKKRKVGSGSGSEVQLLESGGGLVQPGGSLRLSAAASGFTFGDADMGWFRQAPGKEREGVSAISASGDSTYYADSVKGRFTISRDNSKNTLYLQMNSLRAEDTAVYYAAHLDQELTGASEHDYWGRGTQVTVSSGGGSSVNISGQNTMNMVKVPECRLADELGGLWENSRFTDCCLCVAGQEFQAHKAILAARSPVFSAMFEHEMEESKKNRVEINDVEPEVFKEMMCFIYTGKAPNLDKMADDLLAAADKYALERLKVMCEDALCSNLSVENAAEILILADLHSADQLKTQAVDFINYHASDVLETSGWKSMVVSHPHLVAEAYRSLASAQCPFLGPPRKRLKQS

SEQ ID NO: 2816 - protein, 378 aa, synthetic construct
  source 1..378: note = HA-3xsvNLS-mycV.1300-(GGGS)2-SPOP.2
MGYPYDVPDYAPKKKRKVQPKKKRKVQPKKKRKVGSGSGSEVQLLESGGGLVQPGGSLRLSAAASGFTFGDADMGWFRQAPGKEREGVSAISASGDSTYYADSVKGRFTISRDNSKNTLYLQMNSLRAEDTAVYYAAHLDQELTGASEHDYWGRGTQVTVSSGGGSGGGSSVNISGQNTMNMVKVPECRLADELGGLWENSRFTDCCLCVAGQEFQAHKAILAARSPVFSAMFEHEMEESKKNRVEINDVEPEVFKEMMCFIYTGKAPNLDKMADDLLAAADKYALERLKVMCEDALCSNLSVENAAEILILADLHSADQLKTQAVDFINYHASDVLETSGWKSMVVSHPHLVAEAYRSLASAQCPFLGPPRKRLKQS

SEQ ID NO: 2817 - protein, 371 aa, synthetic construct
  source 1..371: note = HA-nlpNLS-mycV.1300-(GGGS)1-SPOP.2
MGYPYDVPDYAAVKRPAATKKAGQAKKKKLDGSGSGSEVQLLESGGGLVQPGGSLRLSAAASGFTFGDADMGWFRQAPGKEREGVSAISASGDSTYYADSVKGRFTISRDNSKNTLYLQMNSLRAEDTAVYYAAHLDQELTGASEHDYWGRGTQVTVSSGGGSSVNISGQNTMNMVKVPECRLADELGGLWENSRFTDCCLCVAGQEFQAHKAILAARSPVFSAMFEHEMEESKKNRVEINDVEPEVFKEMMCFIYTGKAPNLDKMADDLLAAADKYALERLKVMCEDALCSNLSVENAAEILILADLHSADQLKTQAVDFINYHASDVLETSGWKSMVVSHPHLVAEAYRSLASAQCPFLGPPRKRLKQS

SEQ ID NO: 2818 - protein, 375 aa, synthetic construct
  source 1..375: note = HA-nlpNLS-mycV.1300-(GGGS)2-SPOP.2
MGYPYDVPDYAAVKRPAATKKAGQAKKKKLDGSGSGSEVQLLESGGGLVQPGGSLRLSAAASGFTFGDADMGWFRQAPGKEREGVSAISASGDSTYYADSVKGRFTISRDNSKNTLYLQMNSLRAEDTAVYYAAHLDQELTGASEHDYWGRGTQVTVSSGGGSGGGSSVNISGQNTMNMVKVPECRLADELGGLWENSRFTDCCLCVAGQEFQAHKAILAARSPVFSAMFEHEMEESKKNRVEINDVEPEVFKEMMCFIYTGKAPNLDKMADDLLAAADKYALERLKVMCEDALCSNLSVENAAEILILADLHSADQLKTQAVDFINYHASDVLETSGWKSMVVSHPHLVAEAYRSLASAQCPFLGPPRKRLKQS

SEQ ID NO: 2819 - protein, 262 aa, synthetic construct
  source 1..262: note = HA-3xsvNLS-RNF125.2-(GGGS)1-mycV.1300
MGYPYDVPDYAPKKKRKVQPKKKRKVQPKKKRKVGSGSGSTSFDCAVCLEVLHQPVRTRCGHVFCRSCIATSLKNNKWTCPYCRAYLPSEGVPATDVAKRMKSEYKNCAECDTLVCLSEMRAHIRTCQKYIDKYGPGGGSEVQLLESGGGLVQPGGSLRLSAAASGFTFGDADMGWFRQAPGKEREGVSAISASGDSTYYADSVKGRFTISRDNSKNTLYLQMNSLRAEDTAVYYAAHLDQELTGASEHDYWGRGTQVTVSS

SEQ ID NO: 2820 - protein, 266 aa, synthetic construct
  source 1..266: note = HA-3xsvNLS-RNF125.2-(GGGS)2-mycV.1300
MGYPYDVPDYAPKKKRKVQPKKKRKVQPKKKRKVGSGSGSTSFDCAVCLEVLHQPVRTRCGHVFCRSCIATSLKNNKWTCPYCRAYLPSEGVPATDVAKRMKSEYKNCAECDTLVCLSEMRAHIRTCQKYIDKYGPGGGSGGGSEVQLLESGGGLVQPGGSLRLSAAASGFTFGDADMGWFRQAPGKEREGVSAISASGDSTYYADSVKGRFTISRDNSKNTLYLQMNSLRAEDTAVYYAAHLDQELTGASEHDYWGRGTQVTVSS

SEQ ID NO: 2821 - protein, 259 aa, synthetic construct
  source 1..259: note = HA-nlpNLS-RNF125.2-(GGGS)1-mycV.1300
MGYPYDVPDYAAVKRPAATKKAGQAKKKKLDGSGSGSTSFDCAVCLEVLHQPVRTRCGHVFCRSCIATSLKNNKWTCPYCRAYLPSEGVPATDVAKRMKSEYKNCAECDTLVCLSEMRAHIRTCQKYIDKYGPGGGSEVQLLESGGGLVQPGGSLRLSAAASGFTFGDADMGWFRQAPGKEREGVSAISASGDSTYYADSVKGRFTISRDNSKNTLYLQMNSLRAEDTAVYYAAHLDQELTGASEHDYWGRGTQVTVSS

SEQ ID NO: 2822 - protein, 263 aa, synthetic construct
  source 1..263: note = HA-nlpNLS-RNF125.2-(GGGS)2-mycV.1300
MGYPYDVPDYAAVKRPAATKKAGQAKKKKLDGSGSGSTSFDCAVCLEVLHQPVRTRCGHVFCRSCIATSLKNNKWTCPYCRAYLPSEGVPATDVAKRMKSEYKNCAECDTLVCLSEMRAHIRTCQKYIDKYGPGGGSGGGSEVQLLESGGGLVQPGGSLRLSAAASGFTFGDADMGWFRQAPGKEREGVSAISASGDSTYYADSVKGRFTISRDNSKNTLYLQMNSLRAEDTAVYYAAHLDQELTGASEHDYWGRGTQVTVSS

SEQ ID NO: 2823 - protein, 208 aa, synthetic construct
  source 1..208: note = HA-3xsvNLS-mycV.1300-(GGGS)1-VIF.1
MGYPYDVPDYAPKKKRKVQPKKKRKVQPKKKRKVGSGSGSEVQLLESGGGLVQPGGSLRLSAAASGFTFGDADMGWFRQAPGKEREGVSAISASGDSTYYADSVKGRFTISRDNSKNTLYLQMNSLRAEDTAVYYAAHLDQELTGASEHDYWGRGTQVTVSSGGGSSESAIRNTILGRIVSPRCEYQAGHNKVGSLQYLALAALIKPK

SEQ ID NO: 2824 - protein, 212 aa, synthetic construct
  source 1..212: note = HA-3xsvNLS-mycV.1300-(GGGS)2-VIF.1
MGYPYDVPDYAPKKKRKVQPKKKRKVQPKKKRKVGSGSGSEVQLLESGGGLVQPGGSLRLSAAASGFTFGDADMGWFRQAPGKEREGVSAISASGDSTYYADSVKGRFTISRDNSKNTLYLQMNSLRAEDTAVYYAAHLDQELTGASEHDYWGRGTQVTVSSGGGSGGGSSESAIRNTILGRIVSPRCEYQAGHNKVGSLQYLALAALIKPK

SEQ ID NO: 2825 - protein, 205 aa, synthetic construct
  source 1..205: note = HA-nlpNLS-mycV.1300-(GGGS)1-VIF.1
MGYPYDVPDYAAVKRPAATKKAGQAKKKKLDGSGSGSEVQLLESGGGLVQPGGSLRLSAAASGFTFGDADMGWFRQAPGKEREGVSAISASGDSTYYADSVKGRFTISRDNSKNTLYLQMNSLRAEDTAVYYAAHLDQELTGASEHDYWGRGTQVTVSSGGGSSESAIRNTILGRIVSPRCEYQAGHNKVGSLQYLALAALIKPK

SEQ ID NO: 2826 - protein, 209 aa, synthetic construct
  source 1..209: note = HA-nlpNLS-mycV.1300-(GGGS)2-VIF.1
MGYPYDVPDYAAVKRPAATKKAGQAKKKKLDGSGSGSEVQLLESGGGLVQPGGSLRLSAAASGFTFGDADMGWFRQAPGKEREGVSAISASGDSTYYADSVKGRFTISRDNSKNTLYLQMNSLRAEDTAVYYAAHLDQELTGASEHDYWGRGTQVTVSSGGGSGGGSSESAIRNTILGRIVSPRCEYQAGHNKVGSLQYLALAALIKPK

SEQ ID NO: 2827 - protein, 529 aa, synthetic construct
  source 1..529: note = HA-3xsvNLS-FBXW7a.1-(GGGS)1-mycV.1500
MGYPYDVPDYAPKKKRKVQPKKKRKVQPKKKRKVNQELLSVGSKRRRTGGSLRGNPSSSQVDEEQMNRVVEEEQQQQLRQQEEEHTARNGEVVGVEPRPGGQNDSQQGQLEENNNRFISVDEDSSGNQEEQEEDEEHAGEQDEEDEEEEEMDQESDDFDQSDDSSREDEHTHTNSVTNSSSIVDLPVHQLSSPFYTKTTKMKRKLDHGSEVRSFSLGKKPCKVSEYTSTTGLVPCSATPTTFGDLRAANGQGQQRRRITSVQPPTGLQEWLKMFQSWSGPEKLLALDELIDSCEPTQVKHMMQVIEPQFQRDFISLLPKELALYVLSFLEPKDLLQAAQTCRYWRILAEDNLLWREKCKEEGIDEPLHIKRRKVIKPGFIHSPWKSAYIRQHRIDTNSRRGGGGSEVQLLESGGGLVQPGGSLRLSAAASGFTFADTDMGWFRQAPGKEREGVSAISGSGGSTYYADSVKGRFTISRDNSKNTLYLQMNSLRAEDTAVYYVAIIDDILTGGTFDEGDYWGRGTQVTVSS

SEQ ID NO: 2828 - protein, 533 aa, synthetic construct
  source 1..533: note = HA-3xsvNLS-FBXW7a.1-(GGGS)2-mycV.1500
MGYPYDVPDYAPKKKRKVQPKKKRKVQPKKKRKVNQELLSVGSKRRRTGGSLRGNPSSSQVDEEQMNRVVEEEQQQQLRQQEEEHTARNGEVVGVEPRPGGQNDSQQGQLEENNNRFISVDEDSSGNQEEQEEDEEHAGEQDEEDEEEEEMDQESDDFDQSDDSSREDEHTHTNSVTNSSSIVDLPVHQLSSPFYTKTTKMKRKLDHGSEVRSFSLGKKPCKVSEYTSTTGLVPCSATPTTFGDLRAANGQGQQRRRITSVQPPTGLQEWLKMFQSWSGPEKLLALDELIDSCEPTQVKHMMQVIEPQFQRDFISLLPKELALYVLSFLEPKDLLQAAQTCRYWRILAEDNLLWREKCKEEGIDEPLHIKRRKVIKPGFIHSPWKSAYIRQHRIDTNSRRGGGGSGGGSEVQLLESGGGLVQPGGSLRLSAAASGFTFADTDMGWFRQAPGKEREGVSAISGSGGSTYYADSVKGRFTISRDNSKNTLYLQMNSLRAEDTAVYYVAIIDDILTGGTFDEGDYWGRGTQVTVSS

SEQ ID NO: 2829 - protein, 526 aa, synthetic construct
  source 1..526: note = HA-nlpsvNLS-FBXW7a.1-(GGGS)-mycV.1500
MGYPYDVPDYAAVKRPAATKKAGQAKKKKLDNQELLSVGSKRRRTGGSLRGNPSSSQVDEEQMNRVVEEEQQQQLRQQEEEHTARNGEVVGVEPRPGGQNDSQQGQLEENNNRFISVDEDSSGNQEEQEEDEEHAGEQDEEDEEEEEMDQESDDFDQSDDSSREDEHTHTNSVTNSSSIVDLPVHQLSSPFYTKTTKMKRKLDHGSEVRSFSLGKKPCKVSEYTSTTGLVPCSATPTTFGDLRAANGQGQQRRRITSVQPPTGLQEWLKMFQSWSGPEKLLALDELIDSCEPTQVKHMMQVIEPQFQRDFISLLPKELALYVLSFLEPKDLLQAAQTCRYWRILAEDNLLWREKCKEEGIDEPLHIKRRKVIKPGFIHSPWKSAYIRQHRIDTNSRRGGGGSEVQLLESGGGLVQPGGSLRLSAAASGFTFADTDMGWFRQAPGKEREGVSAISGSGGSTYYADSVKGRFTISRDNSKNTLYLQMNSLRAEDTAVYYVAIIDDILTGGTFDEGDYWGRGTQVTVSS

SEQ ID NO: 2830 - protein, 530 aa, synthetic construct
  source 1..530: note = HA-nlpNLS-FBXW7a.1-(GGGS)2-mycV.1500
MGYPYDVPDYAAVKRPAATKKAGQAKKKKLDNQELLSVGSKRRRTGGSLRGNPSSSQVDEEQMNRVVEEEQQQQLRQQEEEHTARNGEVVGVEPRPGGQNDSQQGQLEENNNRFISVDEDSSGNQEEQEEDEEHAGEQDEEDEEEEEMDQESDDFDQSDDSSREDEHTHTNSVTNSSSIVDLPVHQLSSPFYTKTTKMKRKLDHGSEVRSFSLGKKPCKVSEYTSTTGLVPCSATPTTFGDLRAANGQGQQRRRITSVQPPTGLQEWLKMFQSWSGPEKLLALDELIDSCEPTQVKHMMQVIEPQFQRDFISLLPKELALYVLSFLEPKDLLQAAQTCRYWRILAEDNLLWREKCKEEGIDEPLHIKRRKVIKPGFIHSPWKSAYIRQHRIDTNSRRGGGGSGGGSEVQLLESGGGLVQPGGSLRLSAAASGFTFADTDMGWFRQAPGKEREGVSAISGSGGSTYYADSVKGRFTISRDNSKNTLYLQMNSLRAEDTAVYYVAIIDDILTGGTFDEGDYWGRGTQVTVSS

SEQ ID NO: 2831 - protein, 376 aa, synthetic construct
  source 1..376: note = HA-3xsvNLS-mycV.1500-(GGGS)1-SPOP.2
MGYPYDVPDYAPKKKRKVQPKKKRKVQPKKKRKVGSGSGSEVQLLESGGGLVQPGGSLRLSAAASGFTFADTDMGWFRQAPGKEREGVSAISGSGGSTYYADSVKGRFTISRDNSKNTLYLQMNSLRAEDTAVYYVAIIDDILTGGTFDEGDYWGRGTQVTVSSGGGSSVNISGQNTMNMVKVPECRLADELGGLWENSRFTDCCLCVAGQEFQAHKAILAARSPVFSAMFEHEMEESKKNRVEINDVEPEVFKEMMCFIYTGKAPNLDKMADDLLAAADKYALERLKVMCEDALCSNLSVENAAEILILADLHSADQLKTQAVDFINYHASDVLETSGWKSMVVSHPHLVAEAYRSLASAQCPFLGPPRKRLKQS

SEQ ID NO: 2832 - protein, 380 aa, synthetic construct
  source 1..380: note = HA-3xsvNLS-mycV.1500-(GGGS)2-SPOP.2
MGYPYDVPDYAPKKKRKVQPKKKRKVQPKKKRKVGSGSGSEVQLLESGGGLVQPGGSLRLSAAASGFTFADTDMGWFRQAPGKEREGVSAISGSGGSTYYADSVKGRFTISRDNSKNTLYLQMNSLRAEDTAVYYVAIIDDILTGGTFDEGDYWGRGTQVTVSSGGGSGGGSSVNISGQNTMNMVKVPECRLADELGGLWENSRFTDCCLCVAGQEFQAHKAILAARSPVFSAMFEHEMEESKKNRVEINDVEPEVFKEMMCFIYTGKAPNLDKMADDLLAAADKYALERLKVMCEDALCSNLSVENAAEILILADLHSADQLKTQAVDFINYHASDVLETSGWKSMVVSHPHLVAEAYRSLASAQCPFLGPPRKRLKQS

SEQ ID NO: 2833 - protein, 373 aa, synthetic construct
  source 1..373: note = HA-nlpNLS-mycV.1500-(GGGS)1-SPOP.2
MGYPYDVPDYAAVKRPAATKKAGQAKKKKLDGSGSGSEVQLLESGGGLVQPGGSLRLSAAASGFTFADTDMGWFRQAPGKEREGVSAISGSGGSTYYADSVKGRFTISRDNSKNTLYLQMNSLRAEDTAVYYVAIIDDILTGGTFDEGDYWGRGTQVTVSSGGGSSVNISGQNTMNMVKVPECRLADELGGLWENSRFTDCCLCVAGQEFQAHKAILAARSPVFSAMFEHEMEESKKNRVEINDVEPEVFKEMMCFIYTGKAPNLDKMADDLLAAADKYALERLKVMCEDALCSNLSVENAAEILILADLHSADQLKTQAVDFINYHASDVLETSGWKSMVVSHPHLVAEAYRSLASAQCPFLGPPRKRLKQS

SEQ ID NO: 2834 - protein, 377 aa, synthetic construct
  source 1..377: note = HA-nlpNLS-mycV.1500-(GGGS)2-SPOP.2
MGYPYDVPDYAAVKRPAATKKAGQAKKKKLDGSGSGSEVQLLESGGGLVQPGGSLRLSAAASGFTFADTDMGWFRQAPGKEREGVSAISGSGGSTYYADSVKGRFTISRDNSKNTLYLQMNSLRAEDTAVYYVAIIDDILTGGTFDEGDYWGRGTQVTVSSGGGSGGGSSVNISGQNTMNMVKVPECRLADELGGLWENSRFTDCCLCVAGQEFQAHKAILAARSPVFSAMFEHEMEESKKNRVEINDVEPEVFKEMMCFIYTGKAPNLDKMADDLLAAADKYALERLKVMCEDALCSNLSVENAAEILILADLHSADQLKTQAVDFINYHASDVLETSGWKSMVVSHPHLVAEAYRSLASAQCPFLGPPRKRLKQS

SEQ ID NO: 2835 - protein, 264 aa, synthetic construct
  source 1..264: note = HA-3xsvNLS-RNF125.2-(GGGS)1-mycV.1500
MGYPYDVPDYAPKKKRKVQPKKKRKVQPKKKRKVGSGSGSTSFDCAVCLEVLHQPVRTRCGHVFCRSCIATSLKNNKWTCPYCRAYLPSEGVPATDVAKRMKSEYKNCAECDTLVCLSEMRAHIRTCQKYIDKYGPGGGSEVQLLESGGGLVQPGGSLRLSAAASGFTFADTDMGWFRQAPGKEREGVSAISGSGGSTYYADSVKGRFTISRDNSKNTLYLQMNSLRAEDTAVYYVAIIDDILTGGTFDEGDYWGRGTQVTVSS

SEQ ID NO: 2836 - protein, 268 aa, synthetic construct
  source 1..268: note = HA-3xsvNLS-RNF125.2-(GGGS)2-mycV.1500
MGYPYDVPDYAPKKKRKVQPKKKRKVQPKKKRKVGSGSGSTSFDCAVCLEVLHQPVRTRCGHVFCRSCIATSLKNNKWTCPYCRAYLPSEGVPATDVAKRMKSEYKNCAECDTLVCLSEMRAHIRTCQKYIDKYGPGGGSGGGSEVQLLESGGGLVQPGGSLRLSAAASGFTFADTDMGWFRQAPGKEREGVSAISGSGGSTYYADSVKGRFTISRDNSKNTLYLQMNSLRAEDTAVYYVAIIDDILTGGTFDEGDYWGRGTQVTVSS

SEQ ID NO: 2837 - protein, 261 aa, synthetic construct
  source 1..261: note = HA-nlpNLS-RNF125.2-(GGGS)1-mycV.1500
MGYPYDVPDYAAVKRPAATKKAGQAKKKKLDGSGSGSTSFDCAVCLEVLHQPVRTRCGHVFCRSCIATSLKNNKWTCPYCRAYLPSEGVPATDVAKRMKSEYKNCAECDTLVCLSEMRAHIRTCQKYIDKYGPGGGSEVQLLESGGGLVQPGGSLRLSAAASGFTFADTDMGWFRQAPGKEREGVSAISGSGGSTYYADSVKGRFTISRDNSKNTLYLQMNSLRAEDTAVYYVAIIDDILTGGTFDEGDYWGRGTQVTVSS

SEQ ID NO: 2838 - protein, 265 aa, synthetic construct
  source 1..265: note = HA-nlpNLS-RNF125.2-(GGGS)2-mycV.1500
MGYPYDVPDYAAVKRPAATKKAGQAKKKKLDGSGSGSTSFDCAVCLEVLHQPVRTRCGHVFCRSCIATSLKNNKWTCPYCRAYLPSEGVPATDVAKRMKSEYKNCAECDTLVCLSEMRAHIRTCQKYIDKYGPGGGSGGGSEVQLLESGGGLVQPGGSLRLSAAASGFTFADTDMGWFRQAPGKEREGVSAISGSGGSTYYADSVKGRFTISRDNSKNTLYLQMNSLRAEDTAVYYVAIIDDILTGGTFDEGDYWGRGTQVTVSS

SEQ ID NO: 2839 - protein, 210 aa, synthetic construct
  source 1..210: note = HA-3xsvNLS-mycV.1500-(GGGS)1-VIF.1
MGYPYDVPDYAPKKKRKVQPKKKRKVQPKKKRKVGSGSGSEVQLLESGGGLVQPGGSLRLSAAASGFTFADTDMGWFRQAPGKEREGVSAISGSGGSTYYADSVKGRFTISRDNSKNTLYLQMNSLRAEDTAVYYVAIIDDILTGGTFDEGDYWGRGTQVTVSSGGGSSESAIRNTILGRIVSPRCEYQAGHNKVGSLQYLALAALIKPK

SEQ ID NO: 2840 - protein, 214 aa, synthetic construct
  source 1..214: note = HA-3xsvNLS-mycV.1500-(GGGS)2-VIF.1
MGYPYDVPDYAPKKKRKVQPKKKRKVQPKKKRKVGSGSGSEVQLLESGGGLVQPGGSLRLSAAASGFTFADTDMGWFRQAPGKEREGVSAISGSGGSTYYADSVKGRFTISRDNSKNTLYLQMNSLRAEDTAVYYVAIIDDILTGGTFDEGDYWGRGTQVTVSSGGGSGGGSSESAIRNTILGRIVSPRCEYQAGHNKVGSLQYLALAALIKPK

SEQ ID NO: 2841 - protein, 207 aa, synthetic construct
  source 1..207: note = HA-nlpNLS-mycV.1500-(GGGS)1-VIF.1
MGYPYDVPDYAAVKRPAATKKAGQAKKKKLDGSGSGSEVQLLESGGGLVQPGGSLRLSAAASGFTFADTDMGWFRQAPGKEREGVSAISGSGGSTYYADSVKGRFTISRDNSKNTLYLQMNSLRAEDTAVYYVAIIDDILTGGTFDEGDYWGRGTQVTVSSGGGSSESAIRNTILGRIVSPRCEYQAGHNKVGSLQYLALAALIKPK

SEQ ID NO: 2842 - protein, 211 aa, synthetic construct
  source 1..211: note = HA-nlpNLS-mycV.1500-(GGGS)2-VIF.1
MGYPYDVPDYAAVKRPAATKKAGQAKKKKLDGSGSGSEVQLLESGGGLVQPGGSLRLSAAASGFTFADTDMGWFRQAPGKEREGVSAISGSGGSTYYADSVKGRFTISRDNSKNTLYLQMNSLRAEDTAVYYVAIIDDILTGGTFDEGDYWGRGTQVTVSSGGGSGGGSSESAIRNTILGRIVSPRCEYQAGHNKVGSLQYLALAALIKPK

SEQ ID NO: 2843 - protein, 529 aa, synthetic construct
  source 1..529: note = HA-3xsvNLS-FBXW7a.1-(GGGS)1-mycV.6600
MGYPYDVPDYAPKKKRKVQPKKKRKVQPKKKRKVNQELLSVGSKRRRTGGSLRGNPSSSQVDEEQMNRVVEEEQQQQLRQQEEEHTARNGEVVGVEPRPGGQNDSQQGQLEENNNRFISVDEDSSGNQEEQEEDEEHAGEQDEEDEEEEEMDQESDDFDQSDDSSREDEHTHTNSVTNSSSIVDLPVHQLSSPFYTKTTKMKRKLDHGSEVRSFSLGKKPCKVSEYTSTTGLVPCSATPTTFGDLRAANGQGQQRRRITSVQPPTGLQEWLKMFQSWSGPEKLLALDELIDSCEPTQVKHMMQVIEPQFQRDFISLLPKELALYVLSFLEPKDLLQAAQTCRYWRILAEDNLLWREKCKEEGIDEPLHIKRRKVIKPGFIHSPWKSAYIRQHRIDTNSRRGGGGSEVQLLESGGGLVQPGGSLRLSCAASGFTFSSYAMSWFRQAPGKEREGVSAISGSGGSTYYADSVKGRFTISRDNSKNTLYLQMNSLRAEDTAVYYCATLDEYSGFGGASEADYWGQGTQVTVSS

SEQ ID NO: 2844 - protein, 533 aa, synthetic construct
  source 1..533: note = HA-3xsvNLS-FBXW7a.1-(GGGS)2-mycV.6600
MGYPYDVPDYAPKKKRKVQPKKKRKVQPKKKRKVNQELLSVGSKRRRTGGSLRGNPSSSQVDEEQMNRVVEEEQQQQLRQQEEEHTARNGEVVGVEPRPGGQNDSQQGQLEENNNRFISVDEDSSGNQEEQEEDEEHAGEQDEEDEEEEEMDQESDDFDQSDDSSREDEHTHTNSVTNSSSIVDLPVHQLSSPFYTKTTKMKRKLDHGSEVRSFSLGKKPCKVSEYTSTTGLVPCSATPTTFGDLRAANGQGQQRRRITSVQPPTGLQEWLKMFQSWSGPEKLLALDELIDSCEPTQVKHMMQVIEPQFQRDFISLLPKELALYVLSFLEPKDLLQAAQTCRYWRILAEDNLLWREKCKEEGIDEPLHIKRRKVIKPGFIHSPWKSAYIRQHRIDTNSRRGGGGSGGGSEVQLLESGGGLVQPGGSLRLSCAASGFTFSSYAMSWFRQAPGKEREGVSAISGSGGSTYYADSVKGRFTISRDNSKNTLYLQMNSLRAEDTAVYYCATLDEYSGFGGASEADYWGQGTQVTVSS

SEQ ID NO: 2845 - protein, 526 aa, synthetic construct
  source 1..526: note = HA-nlpsvNLS-FBXW7a.1-(GGGS)1-mycV.6600
MGYPYDVPDYAAVKRPAATKKAGQAKKKKLDNQELLSVGSKRRRTGGSLRGNPSSSQVDEEQMNRVVEEEQQQQLRQQEEEHTARNGEVVGVEPRPGGQNDSQQGQLEENNNRFISVDEDSSGNQEEQEEDEEHAGEQDEEDEEEEEMDQESDDFDQSDDSSREDEHTHTNSVTNSSSIVDLPVHQLSSPFYTKTTKMKRKLDHGSEVRSFSLGKKPCKVSEYTSTTGLVPCSATPTTFGDLRAANGQGQQRRRITSVQPPTGLQEWLKMFQSWSGPEKLLALDELIDSCEPTQVKHMMQVIEPQFQRDFISLLPKELALYVLSFLEPKDLLQAAQTCRYWRILAEDNLLWREKCKEEGIDEPLHIKRRKVIKPGFIHSPWKSAYIRQHRIDTNSRRGGGGSEVQLLESGGGLVQPGGSLRLSCAASGFTFSSYAMSWFRQAPGKEREGVSAISGSGGSTYYADSVKGRFTISRDNSKNTLYLQMNSLRAEDTAVYYCATLDEYSGFGGASEADYWGQGTQVTVSS

SEQ ID NO: 2846 - protein, 530 aa, synthetic construct
  source 1..530: note = HA-nlpNLS-FBXW7a.1-(GGGS)2-mycV.6600
MGYPYDVPDYAAVKRPAATKKAGQAKKKKLDNQELLSVGSKRRRTGGSLRGNPSSSQVDEEQMNRVVEEEQQQQLRQQEEEHTARNGEVVGVEPRPGGQNDSQQGQLEENNNRFISVDEDSSGNQEEQEEDEEHAGEQDEEDEEEEEMDQESDDFDQSDDSSREDEHTHTNSVTNSSSIVDLPVHQLSSPFYTKTTKMKRKLDHGSEVRSFSLGKKPCKVSEYTSTTGLVPCSATPTTFGDLRAANGQGQQRRRITSVQPPTGLQEWLKMFQSWSGPEKLLALDELIDSCEPTQVKHMMQVIEPQFQRDFISLLPKELALYVLSFLEPKDLLQAAQTCRYWRILAEDNLLWREKCKEEGIDEPLHIKRRKVIKPGFIHSPWKSAYIRQHRIDTNSRRGGGGSGGGSEVQLLESGGGLVQPGGSLRLSCAASGFTFSSYAMSWFRQAPGKEREGVSAISGSGGSTYYADSVKGRFTISRDNSKNTLYLQMNSLRAEDTAVYYCATLDEYSGFGGASEADYWGQGTQVTVSS

SEQ ID NO: 2847 - protein, 376 aa, synthetic construct
  source 1..376: note = HA-3xsvNLS-mycV.6600-(GGGS)-SPOP.2
MGYPYDVPDYAPKKKRKVQPKKKRKVQPKKKRKVGSGSGSEVQLLESGGGLVQPGGSLRLSCAASGFTFSSYAMSWFRQAPGKEREGVSAISGSGGSTYYADSVKGRFTISRDNSKNTLYLQMNSLRAEDTAVYYCATLDEYSGFGGASEADYWGQGTQVTVSSGGGSSVNISGQNTMNMVKVPECRLADELGGLWENSRFTDCCLCVAGQEFQAHKAILAARSPVFSAMFEHEMEESKKNRVEINDVEPEVFKEMMCFIYTGKAPNLDKMADDLLAAADKYALERLKVMCEDALCSNLSVENAAEILILADLHSADQLKTQAVDFINYHASDVLETSGWKSMVVSHPHLVAEAYRSLASAQCPFLGPPRKRLKQS

SEQ ID NO: 2848 - protein, 380 aa, synthetic construct
  source 1..380: note = HA-3xsvNLS-mycV.6600-(GGGS)2-SPOP.2
MGYPYDVPDYAPKKKRKVQPKKKRKVQPKKKRKVGSGSGSEVQLLESGGGLVQPGGSLRLSCAASGFTFSSYAMSWFRQAPGKEREGVSAISGSGGSTYYADSVKGRFTISRDNSKNTLYLQMNSLRAEDTAVYYCATLDEYSGFGGASEADYWGQGTQVTVSSGGGSGGGSSVNISGQNTMNMVKVPECRLADELGGLWENSRFTDCCLCVAGQEFQAHKAILAARSPVFSAMFEHEMEESKKNRVEINDVEPEVFKEMMCFIYTGKAPNLDKMADDLLAAADKYALERLKVMCEDALCSNLSVENAAEILILADLHSADQLKTQAVDFINYHASDVLETSGWKSMVVSHPHLVAEAYRSLASAQCPFLGPPRKRLKQS

SEQ ID NO: 2849 - protein, 373 aa, synthetic construct
  source 1..373: note = HA-nlpNLS-mycV.6600-(GGGS)1-SPOP.2
MGYPYDVPDYAAVKRPAATKKAGQAKKKKLDGSGSGSEVQLLESGGGLVQPGGSLRLSCAASGFTFSSYAMSWFRQAPGKEREGVSAISGSGGSTYYADSVKGRFTISRDNSKNTLYLQMNSLRAEDTAVYYCATLDEYSGFGGASEADYWGQGTQVTVSSGGGSSVNISGQNTMNMVKVPECRLADELGGLWENSRFTDCCLCVAGQEFQAHKAILAARSPVFSAMFEHEMEESKKNRVEINDVEPEVFKEMMCFIYTGKAPNLDKMADDLLAAADKYALERLKVMCEDALCSNLSVENAAEILILADLHSADQLKTQAVDFINYHASDVLETSGWKSMVVSHPHLVAEAYRSLASAQCPFLGPPRKRLKQS

SEQ ID NO: 2850 - protein, 377 aa, synthetic construct
  source 1..377: note = HA-nlpNLS-mycV.6600-(GGGS)2-SPOP.2
MGYPYDVPDYAAVKRPAATKKAGQAKKKKLDGSGSGSEVQLLESGGGLVQPGGSLRLSCAASGFTFSSYAMSWFRQAPGKEREGVSAISGSGGSTYYADSVKGRFTISRDNSKNTLYLQMNSLRAEDTAVYYCATLDEYSGFGGASEADYWGQGTQVTVSSGGGSGGGSSVNISGQNTMNMVKVPECRLADELGGLWENSRFTDCCLCVAGQEFQAHKAILAARSPVFSAMFEHEMEESKKNRVEINDVEPEVFKEMMCFIYTGKAPNLDKMADDLLAAADKYALERLKVMCEDALCSNLSVENAAEILILADLHSADQLKTQAVDFINYHASDVLETSGWKSMVVSHPHLVAEAYRSLASAQCPFLGPPRKRLKQS

SEQ ID NO: 2851 - protein, 264 aa, synthetic construct
  source 1..264: note = HA-3xsvNLS-RNF125.2-(GGGS)1-mycV.6600
MGYPYDVPDYAPKKKRKVQPKKKRKVQPKKKRKVGSGSGSTSFDCAVCLEVLHQPVRTRCGHVFCRSCIATSLKNNKWTCPYCRAYLPSEGVPATDVAKRMKSEYKNCAECDTLVCLSEMRAHIRTCQKYIDKYGPGGGSEVQLLESGGGLVQPGGSLRLSCAASGFTFSSYAMSWFRQAPGKEREGVSAISGSGGSTYYADSVKGRFTISRDNSKNTLYLQMNSLRAEDTAVYYCATLDEYSGFGGASEADYWGQGTQVTVSS

SEQ ID NO: 2852 - protein, 268 aa, synthetic construct
  source 1..268: note = HA-3xsvNLS-RNF125.2-(GGGS)2-mycV.6600
MGYPYDVPDYAPKKKRKVQPKKKRKVQPKKKRKVGSGSGSTSFDCAVCLEVLHQPVRTRCGHVFCRSCIATSLKNNKWTCPYCRAYLPSEGVPATDVAKRMKSEYKNCAECDTLVCLSEMRAHIRTCQKYIDKYGPGGGSGGGSEVQLLESGGGLVQPGGSLRLSCAASGFTFSSYAMSWFRQAPGKEREGVSAISGSGGSTYYADSVKGRFTISRDNSKNTLYLQMNSLRAEDTAVYYCATLDEYSGFGGASEADYWGQGTQVTVSS

SEQ ID NO: 2853 - protein, 261 aa, synthetic construct
  source 1..261: note = HA-nlpNLS-RNF125.2-(GGGS)1-mycV.6600
MGYPYDVPDYAAVKRPAATKKAGQAKKKKLDGSGSGSTSFDCAVCLEVLHQPVRTRCGHVFCRSCIATSLKNNKWTCPYCRAYLPSEGVPATDVAKRMKSEYKNCAECDTLVCLSEMRAHIRTCQKYIDKYGPGGGSEVQLLESGGGLVQPGGSLRLSCAASGFTFSSYAMSWFRQAPGKEREGVSAISGSGGSTYYADSVKGRFTISRDNSKNTLYLQMNSLRAEDTAVYYCATLDEYSGFGGASEADYWGQGTQVTVSS

SEQ ID NO: 2854 - protein, 265 aa, synthetic construct
  source 1..265: note = HA-nlpNLS-RNF125.2-(GGGS)2-mycV.6600
MGYPYDVPDYAAVKRPAATKKAGQAKKKKLDGSGSGSTSFDCAVCLEVLHQPVRTRCGHVFCRSCIATSLKNNKWTCPYCRAYLPSEGVPATDVAKRMKSEYKNCAECDTLVCLSEMRAHIRTCQKYIDKYGPGGGSGGGSEVQLLESGGGLVQPGGSLRLSCAASGFTFSSYAMSWFRQAPGKEREGVSAISGSGGSTYYADSVKGRFTISRDNSKNTLYLQMNSLRAEDTAVYYCATLDEYSGFGGASEADYWGQGTQVTVSS

SEQ ID NO: 2855 - protein, 210 aa, synthetic construct
  source 1..210: note = HA-3xsvNLS-mycV.6600-(GGGS)1-VIF.1
MGYPYDVPDYAPKKKRKVQPKKKRKVQPKKKRKVGSGSGSEVQLLESGGGLVQPGGSLRLSCAASGFTFSSYAMSWFRQAPGKEREGVSAISGSGGSTYYADSVKGRFTISRDNSKNTLYLQMNSLRAEDTAVYYCATLDEYSGFGGASEADYWGQGTQVTVSSGGGSSESAIRNTILGRIVSPRCEYQAGHNKVGSLQYLALAALIKPK

SEQ ID NO: 2856 - protein, 214 aa, synthetic construct
  source 1..214: note = HA-3xsvNLS-mycV.6600-(GGGS)2-VIF.1
MGYPYDVPDYAPKKKRKVQPKKKRKVQPKKKRKVGSGSGSEVQLLESGGGLVQPGGSLRLSCAASGFTFSSYAMSWFRQAPGKEREGVSAISGSGGSTYYADSVKGRFTISRDNSKNTLYLQMNSLRAEDTAVYYCATLDEYSGFGGASEADYWGQGTQVTVSSGGGSGGGSSESAIRNTILGRIVSPRCEYQAGHNKVGSLQYLALAALIKPK

SEQ ID NO: 2857 - protein, 207 aa, synthetic construct
  source 1..207: note = HA-nlpNLS-mycV.6600-(GGGS)1-VIF.1
MGYPYDVPDYAAVKRPAATKKAGQAKKKKLDGSGSGSEVQLLESGGGLVQPGGSLRLSCAASGFTFSSYAMSWFRQAPGKEREGVSAISGSGGSTYYADSVKGRFTISRDNSKNTLYLQMNSLRAEDTAVYYCATLDEYSGFGGASEADYWGQGTQVTVSSGGGSSESAIRNTILGRIVSPRCEYQAGHNKVGSLQYLALAALIKPK

SEQ ID NO: 2858 - protein, 211 aa, synthetic construct
  source 1..211: note = HA-nlpNLS-mycV.6600-(GGGS)2-VIF.1
MGYPYDVPDYAAVKRPAATKKAGQAKKKKLDGSGSGSEVQLLESGGGLVQPGGSLRLSCAASGFTFSSYAMSWFRQAPGKEREGVSAISGSGGSTYYADSVKGRFTISRDNSKNTLYLQMNSLRAEDTAVYYCATLDEYSGFGGASEADYWGQGTQVTVSSGGGSGGGSSESAIRNTILGRIVSPRCEYQAGHNKVGSLQYLALAALIKPK

SEQ ID NO: 2859 - protein, 529 aa, synthetic construct
  source 1..529: note = HA-3xsvNLS-FBXW7a.1-(GGGS)1-mycV.0300
MGYPYDVPDYAPKKKRKVQPKKKRKVQPKKKRKVNQELLSVGSKRRRTGGSLRGNPSSSQVDEEQMNRVVEEEQQQQLRQQEEEHTARNGEVVGVEPRPGGQNDSQQGQLEENNNRFISVDEDSSGNQEEQEEDEEHAGEQDEEDEEEEEMDQESDDFDQSDDSSREDEHTHTNSVTNSSSIVDLPVHQLSSPFYTKTTKMKRKLDHGSEVRSFSLGKKPCKVSEYTSTTGLVPCSATPTTFGDLRAANGQGQQRRRITSVQPPTGLQEWLKMFQSWSGPEKLLALDELIDSCEPTQVKHMMQVIEPQFQRDFISLLPKELALYVLSFLEPKDLLQAAQTCRYWRILAEDNLLWREKCKEEGIDEPLHIKRRKVIKPGFIHSPWKSAYIRQHRIDTNSRRGGGGSEVQLLESGGGLVQPGGSLRLSAAASGFTFADTDMGWFRQAPGKEREGVSAISGSGGNTYYADSVKGRFTISRDNSKNTLYLQMNSLRAEDTAVYYAAALGDYGDAIDYSEADYWGQGTQVTVSS

SEQ ID NO: 2860 - protein, 376 aa, synthetic construct
  source 1..376: note = HA-3xsvNLS-mycV.0300-(GGGS)1-SPOP.2
MGYPYDVPDYAPKKKRKVQPKKKRKVQPKKKRKVGSGSGSEVQLLESGGGLVQPGGSLRLSAAASGFTFADTDMGWFRQAPGKEREGVSAISGSGGNTYYADSVKGRFTISRDNSKNTLYLQMNSLRAEDTAVYYAAALGDYGDAIDYSEADYWGQGTQVTVSSGGGSSVNISGQNTMNMVKVPECRLADELGGLWENSRFTDCCLCVAGQEFQAHKAILAARSPVFSAMFEHEMEESKKNRVEINDVEPEVFKEMMCFIYTGKAPNLDKMADDLLAAADKYALERLKVMCEDALCSNLSVENAAEILILADLHSADQLKTQAVDFINYHASDVLETSGWKSMVVSHPHLVAEAYRSLASAQCPFLGPPRKRLKQS

SEQ ID NO: 2861 - protein, 261 aa, synthetic construct
  source 1..261: note = HA-nlpNLS-RNF125.2-(GGGS)1-mycV.0300
MGYPYDVPDYAAVKRPAATKKAGQAKKKKLDGSGSGSTSFDCAVCLEVLHQPVRTRCGHVFCRSCIATSLKNNKWTCPYCRAYLPSEGVPATDVAKRMKSEYKNCAECDTLVCLSEMRAHIRTCQKYIDKYGPGGGSEVQLLESGGGLVQPGGSLRLSAAASGFTFADTDMGWFRQAPGKEREGVSAISGSGGNTYYADSVKGRFTISRDNSKNTLYLQMNSLRAEDTAVYYAAALGDYGDAIDYSEADYWGQGTQVTVSS

SEQ ID NO: 2862 - protein, 283 aa, synthetic construct
  source 1..283: note = HA-mycNLS-RNF125.2-GGGS-mycV.1500-hrpNLS
MGYPYDVPDYAPAAKRVKLDGSGSGSTSFDCAVCLEVLHQPVRTRCGHVFCRSCIATSLKNNKWTCPYCRAYLPSEGVPATDVAKRMKSEYKNCAECDTLVCLSEMRAHIRTCQKYIDKYGPGGGSEVQLLESGGGLVQPGGSLRLSAAASGFTFADTDMGWFRQAPGKEREGVSAISGSGGSTYYADSVKGRFTISRDNSKNTLYLQMNSLRAEDTAVYYVAIIDDILTGGTFDEGDYWGRGTQVTVSSGGGSGSRSGGNHRRNGRGGRGGYNRRNNGYHPY

SEQ ID NO: 2863 - protein, 285 aa, synthetic construct
  source 1..285: note = HA-mycNLS-mycV.1500-(GS)3-RNF125.2-hrpNLS
MGYPYDVPDYAPAAKRVKLDGSGSGSEVQLLESGGGLVQPGGSLRLSAAASGFTFADTDMGWFRQAPGKEREGVSAISGSGGSTYYADSVKGRFTISRDNSKNTLYLQMNSLRAEDTAVYYVAIIDDILTGGTFDEGDYWGRGTQVTVSSGSGSGSTSFDCAVCLEVLHQPVRTRCGHVFCRSCIATSLKNNKWTCPYCRAYLPSEGVPATDVAKRMKSEYKNCAECDTLVCLSEMRAHIRTCQKYIDKYGPGGGSGSRSGGNHRRNGRGGRGGYNRRNNGYHPY

SEQ ID NO: 2864 - protein, 279 aa, synthetic construct
  source 1..279: note = HA-mycNLS-NHLRC1.1-GGGS-mycV.1500-hrpNLS
MGYPYDVPDYAPAAKRVKLDGSGSGSESGPALHELMREAEISLLECKVCFEKFGHRQQRRPRNLSCGHVVCLACVAALAHPRTLALECPFCRRACRGCDTSDCLPVLHLIELLGSALRGGGSEVQLLESGGGLVQPGGSLRLSAAASGFTFADTDMGWFRQAPGKEREGVSAISGSGGSTYYADSVKGRFTISRDNSKNTLYLQMNSLRAEDTAVYYVAIIDDILTGGTFDEGDYWGRGTQVTVSSGGGSGSRSGGNHRRNGRGGRGGYNRRNNGYHPY

SEQ ID NO: 2865 - protein, 279 aa, synthetic construct
  source 1..279: note = HA-mycNLS-mycV.1500-GGGS-NHLRC1.1-hrpNLS
MGYPYDVPDYAPAAKRVKLDGSGSGSEVQLLESGGGLVQPGGSLRLSAAASGFTFADTDMGWFRQAPGKEREGVSAISGSGGSTYYADSVKGRFTISRDNSKNTLYLQMNSLRAEDTAVYYVAIIDDILTGGTFDEGDYWGRGTQVTVSSGGGSESGPALHELMREAEISLLECKVCFEKFGHRQQRRPRNLSCGHVVCLACVAALAHPRTLALECPFCRRACRGCDTSDCLPVLHLIELLGSALRGGGSGSRSGGNHRRNGRGGRGGYNRRNNGYHPY

SEQ ID NO: 2866 - protein, 283 aa, synthetic construct
  source 1..283: note = HA-mycNLS-RNF125.7-GGGS-mycV.1500-hrpNLS
MGYPYDVPDYAPAAKRVKLDGSGSGSTSFDCAVCLEVLHQPVRTRCGHVFCRSCIATSLKNNKWTAPYARAYLPSEGVPATDVAKRMKSEYKNCAECDTLVCLSEMRAHIRTCQKYIDKYGPGGGSEVQLLESGGGLVQPGGSLRLSAAASGFTFADTDMGWFRQAPGKEREGVSAISGSGGSTYYADSVKGRFTISRDNSKNTLYLQMNSLRAEDTAVYYVAIIDDILTGGTFDEGDYWGRGTQVTVSSGGGSGSRSGGNHRRNGRGGRGGYNRRNNGYHPY

SEQ ID NO: 2867 - protein, 261 aa, synthetic construct
  source 1..261: note = HA-nlpNLS-RNF125.2-(GGGS)1-mycV.1501
MGYPYDVPDYAAVKRPAATKKAGQAKKKKLDGSGSGSTSFDCAVCLEVLHQPVRTRCGHVFCRSCIATSLKNNKWTCPYCRAYLPSEGVPATDVAKRMKSEYKNCAECDTLVCLSEMRAHIRTCQKYIDKYGPGGGSEVQLLESGGGLVQPGGSLRLSAAASGFTFADTDMGWFRQAPGAEREGVSAISGSGGSTYYADSVKGRFTISRDNSKNTLYLQMNSLRAEDTAVYYVAIIDDILTGGTFDEGDYWGRGTQVTVSS

SEQ ID NO: 2868 - protein, 261 aa, synthetic construct
  source 1..261: note = HA-nlpNLS-RNF125.2-(GGGS)1-mycV.1502
MGYPYDVPDYAAVKRPAATKKAGQAKKKKLDGSGSGSTSFDCAVCLEVLHQPVRTRCGHVFCRSCIATSLKNNKWTCPYCRAYLPSEGVPATDVAKRMKSEYKNCAECDTLVCLSEMRAHIRTCQKYIDKYGPGGGSEVQLLESGGGLVQPGGSLRLSAAASGFTFADTDMGWFRQAPGREREGVSAISGSGGSTYYADSVKGRFTISRDNSKNTLYLQMNSLRAEDTAVYYVAIIDDILTGGTFDEGDYWGRGTQVTVSS

SEQ ID NO: 2869 - protein, 261 aa, synthetic construct
  source 1..261: note = HA-nlpNLS-RNF125.2-(GGGS)1-mycV.1503
MGYPYDVPDYAAVKRPAATKKAGQAKKKKLDGSGSGSTSFDCAVCLEVLHQPVRTRCGHVFCRSCIATSLKNNKWTCPYCRAYLPSEGVPATDVAKRMKSEYKNCAECDTLVCLSEMRAHIRTCQKYIDKYGPGGGSEVQLLESGGGLVQPGGSLRLSAAASGFTFADTDMGWFRQAPGKEREGVSAISGSGGSTYYADSVKGRFTISRDNSANTLYLQMNSLRAEDTAVYYVAIIDDILTGGTFDEGDYWGRGTQVTVSS

SEQ ID NO: 2870 - protein, 261 aa, synthetic construct
  source 1..261: note = HA-nlpNLS-RNF125.2-(GGGS)1-mycV.1504
MGYPYDVPDYAAVKRPAATKKAGQAKKKKLDGSGSGSTSFDCAVCLEVLHQPVRTRCGHVFCRSCIATSLKNNKWTCPYCRAYLPSEGVPATDVAKRMKSEYKNCAECDTLVCLSEMRAHIRTCQKYIDKYGPGGGSEVQLLESGGGLVQPGGSLRLSAAASGFTFADTDMGWFRQAPGKEREGVSAISGSGGSTYYADSVKGRFTISRDNSRNTLYLQMNSLRAEDTAVYYVAIIDDILTGGTFDEGDYWGRGTQVTVSS

SEQ ID NO: 2871 - protein, 261 aa, synthetic construct
  source 1..261: note = HA-nlpNLS-RNF125.2-(GGGS)1-mycV.1505
MGYPYDVPDYAAVKRPAATKKAGQAKKKKLDGSGSGSTSFDCAVCLEVLHQPVRTRCGHVFCRSCIATSLKNNKWTCPYCRAYLPSEGVPATDVAKRMKSEYKNCAECDTLVCLSEMRAHIRTCQKYIDKYGPGGGSEVQLLESGGGLVQPGGSLRLSAAASGFTFADTDMGWFRQAPGAEREGVSAISGSGGSTYYADSVKGRFTISRDNSANTLYLQMNSLRAEDTAVYYVAIIDDILTGGTFDEGDYWGRGTQVTVSS

SEQ ID NO: 2872 - protein, 261 aa, synthetic construct
  source 1..261: note = HA-nlpNLS-RNF125.2-(GGGS)1-mycV.1506
MGYPYDVPDYAAVKRPAATKKAGQAKKKKLDGSGSGSTSFDCAVCLEVLHQPVRTRCGHVFCRSCIATSLKNNKWTCPYCRAYLPSEGVPATDVAKRMKSEYKNCAECDTLVCLSEMRAHIRTCQKYIDKYGPGGGSEVQLLESGGGLVQPGGSLRLSAAASGFTFADTDMGWFRQAPGREREGVSAISGSGGSTYYADSVKGRFTISRDNSRNTLYLQMNSLRAEDTAVYYVAIIDDILTGGTFDEGDYWGRGTQVTVSS

SEQ ID NO: 2873 - protein, 261 aa, synthetic construct
  source 1..261: note = HA-nlpNLS-RNF125.2-(GGGS)1-mycV.1507
MGYPYDVPDYAAVKRPAATKKAGQAKKKKLDGSGSGSTSFDCAVCLEVLHQPVRTRCGHVFCRSCIATSLKNNKWTCPYCRAYLPSEGVPATDVAKRMKSEYKNCAECDTLVCLSEMRAHIRTCQKYIDKYGPGGGSEVQLLESGGGLVQPGGSLRLSAAASGFTFADTDMGWFRQAPGAEREGVSAISGSGGSTYYADSVKGRFTISRDNSRNTLYLQMNSLRAEDTAVYYVAIIDDILTGGTFDEGDYWGRGTQVTVSS

SEQ ID NO: 2874 - protein, 261 aa, synthetic construct
  source 1..261: note = HA-nlpNLS-RNF125.2-(GGGS)1-mycV.1508
MGYPYDVPDYAAVKRPAATKKAGQAKKKKLDGSGSGSTSFDCAVCLEVLHQPVRTRCGHVFCRSCIATSLKNNKWTCPYCRAYLPSEGVPATDVAKRMKSEYKNCAECDTLVCLSEMRAHIRTCQKYIDKYGPGGGSEVQLLESGGGLVQPGGSLRLSAAASGFTFADTDMGWFRQAPGREREGVSAISGSGGSTYYADSVKGRFTISRDNSANTLYLQMNSLRAEDTAVYYVAIIDDILTGGTFDEGDYWGRGTQVTVSS

SEQ ID NO: 2875 - protein, 250 aa, synthetic construct
  source 1..250: note = HA-mycNLS-RNF125.2-GGGS-mycV.1500
MGYPYDVPDYAPAAKRVKLDGGGSGSTSFDCAVCLEVLHQPVRTRCGHVFCRSCIATSLKNNKWTCPYCRAYLPSEGVPATDVAKRMKSEYKNCAECDTLVCLSEMRAHIRTCQKYIDKYGPGGGSEVQLLESGGGLVQPGGSLRLSAAASGFTFADTDMGWFRQAPGKEREGVSAISGSGGSTYYADSVKGRFTISRDNSKNTLYLQMNSLRAEDTAVYYVAIIDDILTGGTFDEGDYWGRGTQVTVSS

SEQ ID NO: 2876 - protein, 250 aa, synthetic construct
  source 1..250: note = HA-mycNLS-mycV.1500-GGGS-RNF125.2
MGYPYDVPDYAPAAKRVKLDGGGSGSEVQLLESGGGLVQPGGSLRLSAAASGFTFADTDMGWFRQAPGKEREGVSAISGSGGSTYYADSVKGRFTISRDNSKNTLYLQMNSLRAEDTAVYYVAIIDDILTGGTFDEGDYWGRGTQVTVSSGGGSTSFDCAVCLEVLHQPVRTRCGHVFCRSCIATSLKNNKWTCPYCRAYLPSEGVPATDVAKRMKSEYKNCAECDTLVCLSEMRAHIRTCQKYIDKYGP

SEQ ID NO: 2877 - protein, 261 aa, synthetic construct
  source 1..261: note = HA-nlpNLS-RNF125.2-GGGS-mycV.1500
MGYPYDVPDYAAVKRPAATKKAGQAKKKKLDGGGSGSTSFDCAVCLEVLHQPVRTRCGHVFCRSCIATSLKNNKWTCPYCRAYLPSEGVPATDVAKRMKSEYKNCAECDTLVCLSEMRAHIRTCQKYIDKYGPGGGSEVQLLESGGGLVQPGGSLRLSAAASGFTFADTDMGWFRQAPGKEREGVSAISGSGGSTYYADSVKGRFTISRDNSKNTLYLQMNSLRAEDTAVYYVAIIDDILTGGTFDEGDYWGRGTQVTVSS

SEQ ID NO: 2878 - protein, 261 aa, synthetic construct
  source 1..261: note = HA-nlpNLS-mycV.1500-GGGS-RNF125.2
MGYPYDVPDYAAVKRPAATKKAGQAKKKKLDGGGSGSEVQLLESGGGLVQPGGSLRLSAAASGFTFADTDMGWFRQAPGKEREGVSAISGSGGSTYYADSVKGRFTISRDNSKNTLYLQMNSLRAEDTAVYYVAIIDDILTGGTFDEGDYWGRGTQVTVSSGGGSTSFDCAVCLEVLHQPVRTRCGHVFCRSCIATSLKNNKWTCPYCRAYLPSEGVPATDVAKRMKSEYKNCAECDTLVCLSEMRAHIRTCQKYIDKYGP

SEQ ID NO: 2879 - protein, 268 aa, synthetic construct
  source 1..268: note = HA-hrpNLS-RNF125.2-GGGS-mycV.1500
MGYPYDVPDYARSGGNHRRNGRGGRGGYNRRNNGYHPYGGGSGSTSFDCAVCLEVLHQPVRTRCGHVFCRSCIATSLKNNKWTCPYCRAYLPSEGVPATDVAKRMKSEYKNCAECDTLVCLSEMRAHIRTCQKYIDKYGPGGGSEVQLLESGGGLVQPGGSLRLSAAASGFTFADTDMGWFRQAPGKEREGVSAISGSGGSTYYADSVKGRFTISRDNSKNTLYLQMNSLRAEDTAVYYVAIIDDILTGGTFDEGDYWGRGTQVTVSS

SEQ ID NO: 2880 - protein, 268 aa, synthetic construct
  source 1..268: note = HA-hrpNLS-mycV.1500-GGGS-RNF125.2
MGYPYDVPDYARSGGNHRRNGRGGRGGYNRRNNGYHPYGGGSGSEVQLLESGGGLVQPGGSLRLSAAASGFTFADTDMGWFRQAPGKEREGVSAISGSGGSTYYADSVKGRFTISRDNSKNTLYLQMNSLRAEDTAVYYVAIIDDILTGGTFDEGDYWGRGTQVTVSSGGGSTSFDCAVCLEVLHQPVRTRCGHVFCRSCIATSLKNNKWTCPYCRAYLPSEGVPATDVAKRMKSEYKNCAECDTLVCLSEMRAHIRTCQKYIDKYGP

SEQ ID NO: 2881 - protein, 246 aa, synthetic construct
  source 1..246: note = HA-mycNLS-NHLRC1.1-GGGS-mycV.1500
MGYPYDVPDYAPAAKRVKLDGGGSGSESGPALHELMREAEISLLECKVCFEKFGHRQQRRPRNLSCGHVVCLACVAALAHPRTLALECPFCRRACRGCDTSDCLPVLHLIELLGSALRGGGSEVQLLESGGGLVQPGGSLRLSAAASGFTFADTDMGWFRQAPGKEREGVSAISGSGGSTYYADSVKGRFTISRDNSKNTLYLQMNSLRAEDTAVYYVAIIDDILTGGTFDEGDYWGRGTQVTVSS

SEQ ID NO: 2882 - protein, 246 aa, synthetic construct
  source 1..246: note = HA-mycNLS-mycV.1500-GGGS-NHLRC1.1
MGYPYDVPDYAPAAKRVKLDGGGSGSEVQLLESGGGLVQPGGSLRLSAAASGFTFADTDMGWFRQAPGKEREGVSAISGSGGSTYYADSVKGRFTISRDNSKNTLYLQMNSLRAEDTAVYYVAIIDDILTGGTFDEGDYWGRGTQVTVSSGGGSESGPALHELMREAEISLLECKVCFEKFGHRQQRRPRNLSCGHVVCLACVAALAHPRTLALECPFCRRACRGCDTSDCLPVLHLIELLGSALR

SEQ ID NO: 2883 - protein, 257 aa, synthetic construct
  source 1..257: note = HA-nlpNLS-NHLRC1.1-GGGS-mycV.1500
MGYPYDVPDYAAVKRPAATKKAGQAKKKKLDGGGSGSESGPALHELMREAEISLLECKVCFEKFGHRQQRRPRNLSCGHVVCLACVAALAHPRTLALECPFCRRACRGCDTSDCLPVLHLIELLGSALRGGGSEVQLLESGGGLVQPGGSLRLSAAASGFTFADTDMGWFRQAPGKEREGVSAISGSGGSTYYADSVKGRFTISRDNSKNTLYLQMNSLRAEDTAVYYVAIIDDILTGGTFDEGDYWGRGTQVTVSS

SEQ ID NO: 2884 - protein, 257 aa, synthetic construct
  source 1..257: note = HA-nlpNLS-mycV.1500-GGGS-NHLRC1.1
MGYPYDVPDYAAVKRPAATKKAGQAKKKKLDGGGSGSEVQLLESGGGLVQPGGSLRLSAAASGFTFADTDMGWFRQAPGKEREGVSAISGSGGSTYYADSVKGRFTISRDNSKNTLYLQMNSLRAEDTAVYYVAIIDDILTGGTFDEGDYWGRGTQVTVSSGGGSESGPALHELMREAEISLLECKVCFEKFGHRQQRRPRNLSCGHVVCLACVAALAHPRTLALECPFCRRACRGCDTSDCLPVLHLIELLGSALR

SEQ ID NO: 2885 - protein, 264 aa, synthetic construct
  source 1..264: note = HA-hrpNLS-NHLRC1.1-GGGS-mycV.1500
MGYPYDVPDYARSGGNHRRNGRGGRGGYNRRNNGYHPYGGGSGSESGPALHELMREAEISLLECKVCFEKFGHRQQRRPRNLSCGHVVCLACVAALAHPRTLALECPFCRRACRGCDTSDCLPVLHLIELLGSALRGGGSEVQLLESGGGLVQPGGSLRLSAAASGFTFADTDMGWFRQAPGKEREGVSAISGSGGSTYYADSVKGRFTISRDNSKNTLYLQMNSLRAEDTAVYYVAIIDDILTGGTFDEGDYWGRGTQVTVSS

SEQ ID NO: 2886 - protein, 264 aa, synthetic construct
  source 1..264: note = HA-hrpNLS-mycV.1500-GGGS-NHLRC1.1
MGYPYDVPDYARSGGNHRRNGRGGRGGYNRRNNGYHPYGGGSGSEVQLLESGGGLVQPGGSLRLSAAASGFTFADTDMGWFRQAPGKEREGVSAISGSGGSTYYADSVKGRFTISRDNSKNTLYLQMNSLRAEDTAVYYVAIIDDILTGGTFDEGDYWGRGTQVTVSSGGGSESGPALHELMREAEISLLECKVCFEKFGHRQQRRPRNLSCGHVVCLACVAALAHPRTLALECPFCRRACRGCDTSDCLPVLHLIELLGSALR

SEQ ID NO: 2887 - protein, 233 aa, synthetic construct
  source 1..233: note = HA-mycNLS-CBLb.1-GGGS-mycV.1500
MGYPYDVPDYAPAAKRVKLDGGGSGSPHDHIKVTQEQYELECEMGSTFQLCKICAENDKDVKIEPCGHLMCTSCLTAWQESDGQGCPFCRCEIKGTEPIIVDPFDGGGSEVQLLESGGGLVQPGGSLRLSAAASGFTFADTDMGWFRQAPGKEREGVSAISGSGGSTYYADSVKGRFTISRDNSKNTLYLQMNSLRAEDTAVYYVAIIDDILTGGTFDEGDYWGRGTQVTVSS

SEQ ID NO: 2888 - protein, 233 aa, synthetic construct
  source 1..233: note = HA-mycNLS-mycV.1500-GGGS-CBLb.1
MGYPYDVPDYAPAAKRVKLDGGGSGSEVQLLESGGGLVQPGGSLRLSAAASGFTFADTDMGWFRQAPGKEREGVSAISGSGGSTYYADSVKGRFTISRDNSKNTLYLQMNSLRAEDTAVYYVAIIDDILTGGTFDEGDYWGRGTQVTVSSGGGSPHDHIKVTQEQYELECEMGSTFQLCKICAENDKDVKIEPCGHLMCTSCLTAWQESDGQGCPFCRCEIKGTEPIIVDPFD

SEQ ID NO: 2889 - protein, 244 aa, synthetic construct
  source 1..244: note = HA-nlpNLS-CBLb.1-GGGS-mycV.1500
MGYPYDVPDYAAVKRPAATKKAGQAKKKKLDGGGSGSPHDHIKVTQEQYELECEMGSTFQLCKICAENDKDVKIEPCGHLMCTSCLTAWQESDGQGCPFCRCEIKGTEPIIVDPFDGGGSEVQLLESGGGLVQPGGSLRLSAAASGFTFADTDMGWFRQAPGKEREGVSAISGSGGSTYYADSVKGRFTISRDNSKNTLYLQMNSLRAEDTAVYYVAIIDDILTGGTFDEGDYWGRGTQVTVSS

SEQ ID NO: 2890 - protein, 244 aa, synthetic construct
  source 1..244: note = HA-nlpNLS-mycV.1500-GGGS-CBLb.1
MGYPYDVPDYAAVKRPAATKKAGQAKKKKLDGGGSGSEVQLLESGGGLVQPGGSLRLSAAASGFTFADTDMGWFRQAPGKEREGVSAISGSGGSTYYADSVKGRFTISRDNSKNTLYLQMNSLRAEDTAVYYVAIIDDILTGGTFDEGDYWGRGTQVTVSSGGGSPHDHIKVTQEQYELECEMGSTFQLCKICAENDKDVKIEPCGHLMCTSCLTAWQESDGQGCPFCRCEIKGTEPIIVDPFD

SEQ ID NO: 2891 - protein, 251 aa, synthetic construct
  source 1..251: note = HA-hrpNLS-CBLb.1-GGGS-mycV.1500
MGYPYDVPDYARSGGNHRRNGRGGRGGYNRRNNGYHPYGGGSGSPHDHIKVTQEQYELECEMGSTFQLCKICAENDKDVKIEPCGHLMCTSCLTAWQESDGQGCPFCRCEIKGTEPIIVDPFDGGGSEVQLLESGGGLVQPGGSLRLSAAASGFTFADTDMGWFRQAPGKEREGVSAISGSGGSTYYADSVKGRFTISRDNSKNTLYLQMNSLRAEDTAVYYVAIIDDILTGGTFDEGDYWGRGTQVTVSS

SEQ ID NO: 2892 - protein, 251 aa, synthetic construct
  source 1..251: note = HA-hrpNLS-mycV.1500-GGGS-CBLb.1
MGYPYDVPDYARSGGNHRRNGRGGRGGYNRRNNGYHPYGGGSGSEVQLLESGGGLVQPGGSLRLSAAASGFTFADTDMGWFRQAPGKEREGVSAISGSGGSTYYADSVKGRFTISRDNSKNTLYLQMNSLRAEDTAVYYVAIIDDILTGGTFDEGDYWGRGTQVTVSSGGGSPHDHIKVTQEQYELECEMGSTFQLCKICAENDKDVKIEPCGHLMCTSCLTAWQESDGQGCPFCRCEIKGTEPIIVDPFD

SEQ ID NO: 2893 - protein, 282 aa, synthetic construct
  source 1..282: note = HA-mycNLS-TRIM21.2-GGGS-mycV.1500
MGYPYDVPDYAPAAKRVKLDGGGSGSASAARLTMMWEEVTCPICLDPFVEPVSIECGHSFCQECISQVGKGGGSVCPVCRQRFLLKNLRPNRQLANMVNNLKEISQEAREGTQGERCAVHGERLHLFCEKDGKALCWVCAQSRKHRDHAMVPLEGGGSEVQLLESGGGLVQPGGSLRLSAAASGFTFADTDMGWFRQAPGKEREGVSAISGSGGSTYYADSVKGRFTISRDNSKNTLYLQMNSLRAEDTAVYYVAIIDDILTGGTFDEGDYWGRGTQVTVSS

SEQ ID NO: 2894 - protein, 282 aa, synthetic construct
  source 1..282: note = HA-mycNLS-mycV.1500-GGGS-TRIM21.2
MGYPYDVPDYAPAAKRVKLDGGGSGSEVQLLESGGGLVQPGGSLRLSAAASGFTFADTDMGWFRQAPGKEREGVSAISGSGGSTYYADSVKGRFTISRDNSKNTLYLQMNSLRAEDTAVYYVAIIDDILTGGTFDEGDYWGRGTQVTVSSGGGSASAARLTMMWEEVTCPICLDPFVEPVSIECGHSFCQECISQVGKGGGSVCPVCRQRFLLKNLRPNRQLANMVNNLKEISQEAREGTQGERCAVHGERLHLFCEKDGKALCWVCAQSRKHRDHAMVPLE

SEQ ID NO: 2895 - protein, 293 aa, synthetic construct
  source 1..293: note = HA-nlpNLS-TRIM21.2-GGGS-mycV.1500
MGYPYDVPDYAAVKRPAATKKAGQAKKKKLDGGGSGSASAARLTMMWEEVTCPICLDPFVEPVSIECGHSFCQECISQVGKGGGSVCPVCRQRFLLKNLRPNRQLANMVNNLKEISQEAREGTQGERCAVHGERLHLFCEKDGKALCWVCAQSRKHRDHAMVPLEGGGSEVQLLESGGGLVQPGGSLRLSAAASGFTFADTDMGWFRQAPGKEREGVSAISGSGGSTYYADSVKGRFTISRDNSKNTLYLQMNSLRAEDTAVYYVAIIDDILTGGTFDEGDYWGRGTQVTVSS

SEQ ID NO: 2896 - protein, 293 aa, synthetic construct
  source 1..293: note = HA-nlpNLS-mycV.1500-GGGS-TRIM21.2
MGYPYDVPDYAAVKRPAATKKAGQAKKKKLDGGGSGSEVQLLESGGGLVQPGGSLRLSAAASGFTFADTDMGWFRQAPGKEREGVSAISGSGGSTYYADSVKGRFTISRDNSKNTLYLQMNSLRAEDTAVYYVAIIDDILTGGTFDEGDYWGRGTQVTVSSGGGSASAARLTMMWEEVTCPICLDPFVEPVSIECGHSFCQECISQVGKGGGSVCPVCRQRFLLKNLRPNRQLANMVNNLKEISQEAREGTQGERCAVHGERLHLFCEKDGKALCWVCAQSRKHRDHAMVPLE

SEQ ID NO: 2897 - protein, 300 aa, synthetic construct
  source 1..300: note = HA-hrpNLS-TRIM21.2-GGGS-mycV.1500
MGYPYDVPDYARSGGNHRRNGRGGRGGYNRRNNGYHPYGGGSGSASAARLTMMWEEVTCPICLDPFVEPVSIECGHSFCQECISQVGKGGGSVCPVCRQRFLLKNLRPNRQLANMVNNLKEISQEAREGTQGERCAVHGERLHLFCEKDGKALCWVCAQSRKHRDHAMVPLEGGGSEVQLLESGGGLVQPGGSLRLSAAASGFTFADTDMGWFRQAPGKEREGVSAISGSGGSTYYADSVKGRFTISRDNSKNTLYLQMNSLRAEDTAVYYVAIIDDILTGGTFDEGDYWGRGTQVTVSS

SEQ ID NO: 2898 - protein, 300 aa, synthetic construct
  source 1..300: note = HA-hrpNLS-mycV.1500-GGGS-TRIM21.2
MGYPYDVPDYARSGGNHRRNGRGGRGGYNRRNNGYHPYGGGSGSEVQLLESGGGLVQPGGSLRLSAAASGFTFADTDMGWFRQAPGKEREGVSAISGSGGSTYYADSVKGRFTISRDNSKNTLYLQMNSLRAEDTAVYYVAIIDDILTGGTFDEGDYWGRGTQVTVSSGGGSASAARLTMMWEEVTCPICLDPFVEPVSIECGHSFCQECISQVGKGGGSVCPVCRQRFLLKNLRPNRQLANMVNNLKEISQEAREGTQGERCAVHGERLHLFCEKDGKALCWVCAQSRKHRDHAMVPLE

SEQ ID NO: 2899 - protein, 215 aa, synthetic construct
  source 1..215: note = HA-mycNLS-RNF4.1-GGGS-mycV.1500
MGYPYDVPDYAPAAKRVKLDGGGSGSVSCPICMDGYSEIVQNGRLIVSTECGHVFCSQCLRDSLKNANTCPTCRKKINHKRYHPIYIGGGSEVQLLESGGGLVQPGGSLRLSAAASGFTFADTDMGWFRQAPGKEREGVSAISGSGGSTYYADSVKGRFTISRDNSKNTLYLQMNSLRAEDTAVYYVAIIDDILTGGTFDEGDYWGRGTQVTVSS

SEQ ID NO: 2900 - protein, 215 aa, synthetic construct
  source 1..215: note = HA-mycNLS-mycV.1500-GGGS-RNF4.1
MGYPYDVPDYAPAAKRVKLDGGGSGSEVQLLESGGGLVQPGGSLRLSAAASGFTFADTDMGWFRQAPGKEREGVSAISGSGGSTYYADSVKGRFTISRDNSKNTLYLQMNSLRAEDTAVYYVAIIDDILTGGTFDEGDYWGRGTQVTVSSGGGSVSCPICMDGYSEIVQNGRLIVSTECGHVFCSQCLRDSLKNANTCPTCRKKINHKRYHPIYI

SEQ ID NO: 2901 - protein, 226 aa, synthetic construct
  source 1..226: note = HA-nlpNLS-RNF4.1-GGGS-mycV.1500
MGYPYDVPDYAAVKRPAATKKAGQAKKKKLDGGGSGSVSCPICMDGYSEIVQNGRLIVSTECGHVFCSQCLRDSLKNANTCPTCRKKINHKRYHPIYIGGGSEVQLLESGGGLVQPGGSLRLSAAASGFTFADTDMGWFRQAPGKEREGVSAISGSGGSTYYADSVKGRFTISRDNSKNTLYLQMNSLRAEDTAVYYVAIIDDILTGGTFDEGDYWGRGTQVTVSS

SEQ ID NO: 2902 - protein, 226 aa, synthetic construct
  source 1..226: note = HA-nlpNLS-mycV.1500-GGGS-RNF4.1
MGYPYDVPDYAAVKRPAATKKAGQAKKKKLDGGGSGSEVQLLESGGGLVQPGGSLRLSAAASGFTFADTDMGWFRQAPGKEREGVSAISGSGGSTYYADSVKGRFTISRDNSKNTLYLQMNSLRAEDTAVYYVAIIDDILTGGTFDEGDYWGRGTQVTVSSGGGSVSCPICMDGYSEIVQNGRLIVSTECGHVFCSQCLRDSLKNANTCPTCRKKINHKRYHPIYI

SEQ ID NO: 2903 - protein, 233 aa, synthetic construct
  source 1..233: note = HA-hrpNLS-RNF4.1-GGGS-mycV.1500
MGYPYDVPDYARSGGNHRRNGRGGRGGYNRRNNGYHPYGGGSGSVSCPICMDGYSEIVQNGRLIVSTECGHVFCSQCLRDSLKNANTCPTCRKKINHKRYHPIYIGGGSEVQLLESGGGLVQPGGSLRLSAAASGFTFADTDMGWFRQAPGKEREGVSAISGSGGSTYYADSVKGRFTISRDNSKNTLYLQMNSLRAEDTAVYYVAIIDDILTGGTFDEGDYWGRGTQVTVSS

SEQ ID NO: 2904 - protein, 233 aa, synthetic construct
  source 1..233: note = HA-hrpNLS-mycV.1500-GGGS-RNF4.1
MGYPYDVPDYARSGGNHRRNGRGGRGGYNRRNNGYHPYGGGSGSEVQLLESGGGLVQPGGSLRLSAAASGFTFADTDMGWFRQAPGKEREGVSAISGSGGSTYYADSVKGRFTISRDNSKNTLYLQMNSLRAEDTAVYYVAIIDDILTGGTFDEGDYWGRGTQVTVSSGGGSVSCPICMDGYSEIVQNGRLIVSTECGHVFCSQCLRDSLKNANTCPTCRKKINHKRYHPIYI

SEQ ID NO: 2905 - protein, 280 aa, synthetic construct
  source 1..280: note = HA-mycNLS-RNF25.1-GGGS-mycV.1500
MGYPYDVPDYAPAAKRVKLDGGGSGSNIPHGQCVICLYGFQEKEAFTKTPCYHYFHCHCLARYIQHMEQELKAQGQEQEQERQHATTKQKAVGVQCPVCREPLVYDLASLKAAPEPQQPMELYQPSAESLRQQEERKRLYQRQQERGGIIDLGGGSEVQLLESGGGLVQPGGSLRLSAAASGFTFADTDMGWFRQAPGKEREGVSAISGSGGSTYYADSVKGRFTISRDNSKNTLYLQMNSLRAEDTAVYYVAIIDDILTGGTFDEGDYWGRGTQVTVSS

SEQ ID NO: 2906 - protein, 280 aa, synthetic construct
  source 1..280: note = HA-mycNLS-mycV.1500-GGGS-RNF25.1
MGYPYDVPDYAPAAKRVKLDGGGSGSEVQLLESGGGLVQPGGSLRLSAAASGFTFADTDMGWFRQAPGKEREGVSAISGSGGSTYYADSVKGRFTISRDNSKNTLYLQMNSLRAEDTAVYYVAIIDDILTGGTFDEGDYWGRGTQVTVSSGGGSNIPHGQCVICLYGFQEKEAFTKTPCYHYFHCHCLARYIQHMEQELKAQGQEQEQERQHATTKQKAVGVQCPVCREPLVYDLASLKAAPEPQQPMELYQPSAESLRQQEERKRLYQRQQERGGIIDL

SEQ ID NO: 2907 - protein, 291 aa, synthetic construct
  source 1..291: note = HA-nlpNLS-RNF25.1-GGGS-mycV.1500
MGYPYDVPDYAAVKRPAATKKAGQAKKKKLDGGGSGSNIPHGQCVICLYGFQEKEAFTKTPCYHYFHCHCLARYIQHMEQELKAQGQEQEQERQHATTKQKAVGVQCPVCREPLVYDLASLKAAPEPQQPMELYQPSAESLRQQEERKRLYQRQQERGGIIDLGGGSEVQLLESGGGLVQPGGSLRLSAAASGFTFADTDMGWFRQAPGKEREGVSAISGSGGSTYYADSVKGRFTISRDNSKNTLYLQMNSLRAEDTAVYYVAIIDDILTGGTFDEGDYWGRGTQVTVSS

SEQ ID NO: 2908 - protein, 291 aa, synthetic construct
  source 1..291: note = HA-nlpNLS-mycV.1500-GGGS-RNF25.1
MGYPYDVPDYAAVKRPAATKKAGQAKKKKLDGGGSGSEVQLLESGGGLVQPGGSLRLSAAASGFTFADTDMGWFRQAPGKEREGVSAISGSGGSTYYADSVKGRFTISRDNSKNTLYLQMNSLRAEDTAVYYVAIIDDILTGGTFDEGDYWGRGTQVTVSSGGGSNIPHGQCVICLYGFQEKEAFTKTPCYHYFHCHCLARYIQHMEQELKAQGQEQEQERQHATTKQKAVGVQCPVCREPLVYDLASLKAAPEPQQPMELYQPSAESLRQQEERKRLYQRQQERGGIIDL

SEQ ID NO: 2909 - protein, 298 aa, synthetic construct
  source 1..298: note = HA-hrpNLS-RNF25.1-GGGS-mycV.1500
MGYPYDVPDYARSGGNHRRNGRGGRGGYNRRNNGYHPYGGGSGSNIPHGQCVICLYGFQEKEAFTKTPCYHYFHCHCLARYIQHMEQELKAQGQEQEQERQHATTKQKAVGVQCPVCREPLVYDLASLKAAPEPQQPMELYQPSAESLRQQEERKRLYQRQQERGGIIDLGGGSEVQLLESGGGLVQPGGSLRLSAAASGFTFADTDMGWFRQAPGKEREGVSAISGSGGSTYYADSVKGRFTISRDNSKNTLYLQMNSLRAEDTAVYYVAIIDDILTGGTFDEGDYWGRGTQVTVSS

SEQ ID NO: 2910 - protein, 298 aa, synthetic construct
  source 1..298: note = HA-hrpNLS-mycV.1500-GGGS-RNF25.1
MGYPYDVPDYARSGGNHRRNGRGGRGGYNRRNNGYHPYGGGSGSEVQLLESGGGLVQPGGSLRLSAAASGFTFADTDMGWFRQAPGKEREGVSAISGSGGSTYYADSVKGRFTISRDNSKNTLYLQMNSLRAEDTAVYYVAIIDDILTGGTFDEGDYWGRGTQVTVSSGGGSNIPHGQCVICLYGFQEKEAFTKTPCYHYFHCHCLARYIQHMEQELKAQGQEQEQERQHATTKQKAVGVQCPVCREPLVYDLASLKAAPEPQQPMELYQPSAESLRQQEERKRLYQRQQERGGIIDL

SEQ ID NO: 2911 - protein, 223 aa, synthetic construct
  source 1..223: note = HA-mycNLS-RNF6.1-GGGS-mycV.1500
MGYPYDVPDYAPAAKRVKLDGGGSGSEQIDNLSTRHYEHNSIDSELGKICSVCISDYVTGNKLRQLPCMHEFHIHCIDRWLSENCTCPICRQPVLGGGSEVQLLESGGGLVQPGGSLRLSAAASGFTFADTDMGWFRQAPGKEREGVSAISGSGGSTYYADSVKGRFTISRDNSKNTLYLQMNSLRAEDTAVYYVAIIDDILTGGTFDEGDYWGRGTQVTVSS

SEQ ID NO: 2912 - protein, 231 aa, synthetic construct
  source 1..231: note = HA-mycNLS-mycV.1500-GGGS-RNF6.2
MGYPYDVPDYAPAAKRVKLDGGGSGSEVQLLESGGGLVQPGGSLRLSAAASGFTFADTDMGWFRQAPGKEREGVSAISGSGGSTYYADSVKGRFTISRDNSKNTLYLQMNSLRAEDTAVYYVAIIDDILTGGTFDEGDYWGRGTQVTVSSGGGSEQIDNLSTRHYEHNSIDSELGKICSVCISDYVTGNKLRQLPCMHEFHIHCIDRWLSENCTCPICRQPVLGSNIANNG

SEQ ID NO: 2913 - protein, 234 aa, synthetic construct
  source 1..234: note = HA-nlpNLS-RNF6.1-GGGS-mycV.1500
MGYPYDVPDYAAVKRPAATKKAGQAKKKKLDGGGSGSEQIDNLSTRHYEHNSIDSELGKICSVCISDYVTGNKLRQLPCMHEFHIHCIDRWLSENCTCPICRQPVLGGGSEVQLLESGGGLVQPGGSLRLSAAASGFTFADTDMGWFRQAPGKEREGVSAISGSGGSTYYADSVKGRFTISRDNSKNTLYLQMNSLRAEDTAVYYVAIIDDILTGGTFDEGDYWGRGTQVTVSS

SEQ ID NO: 2914 - protein, 242 aa, synthetic construct
  source 1..242: note = HA-nlpNLS-mycV.1500-GGGS-RNF6.2
MGYPYDVPDYAAVKRPAATKKAGQAKKKKLDGGGSGSEVQLLESGGGLVQPGGSLRLSAAASGFTFADTDMGWFRQAPGKEREGVSAISGSGGSTYYADSVKGRFTISRDNSKNTLYLQMNSLRAEDTAVYYVAIIDDILTGGTFDEGDYWGRGTQVTVSSGGGSEQIDNLSTRHYEHNSIDSELGKICSVCISDYVTGNKLRQLPCMHEFHIHCIDRWLSENCTCPICRQPVLGSNIANNG

SEQ ID NO: 2915 - protein, 241 aa, synthetic construct
  source 1..241: note = HA-hrpNLS-RNF6.1-GGGS-mycV.1500
MGYPYDVPDYARSGGNHRRNGRGGRGGYNRRNNGYHPYGGGSGSEQIDNLSTRHYEHNSIDSELGKICSVCISDYVTGNKLRQLPCMHEFHIHCIDRWLSENCTCPICRQPVLGGGSEVQLLESGGGLVQPGGSLRLSAAASGFTFADTDMGWFRQAPGKEREGVSAISGSGGSTYYADSVKGRFTISRDNSKNTLYLQMNSLRAEDTAVYYVAIIDDILTGGTFDEGDYWGRGTQVTVSS

SEQ ID NO: 2916 - protein, 249 aa, synthetic construct
  source 1..249: note = HA-hrpNLS-mycV.1500-GGGS-RNF6.2
MGYPYDVPDYARSGGNHRRNGRGGRGGYNRRNNGYHPYGGGSGSEVQLLESGGGLVQPGGSLRLSAAASGFTFADTDMGWFRQAPGKEREGVSAISGSGGSTYYADSVKGRFTISRDNSKNTLYLQMNSLRAEDTAVYYVAIIDDILTGGTFDEGDYWGRGTQVTVSSGGGSEQIDNLSTRHYEHNSIDSELGKICSVCISDYVTGNKLRQLPCMHEFHIHCIDRWLSENCTCPICRQPVLGSNIANNG

SEQ ID NO: 2917 - protein, 223 aa, synthetic construct
  source 1..223: note = HA-mycNLS-RNF12.1-GGGS-mycV.1500
MGYPYDVPDYAPAAKRVKLDGGGSGSGLTKEQIDNLAMRSFGENDALKTCSVCITEYTEGNKLRKLPCSHEYHVHCIDRWLSENSTCPICRRAVLGGGSEVQLLESGGGLVQPGGSLRLSAAASGFTFADTDMGWFRQAPGKEREGVSAISGSGGSTYYADSVKGRFTISRDNSKNTLYLQMNSLRAEDTAVYYVAIIDDILTGGTFDEGDYWGRGTQVTVSS

SEQ ID NO: 2918 - protein, 232 aa, synthetic construct
  source 1..232: note = HA-mycNLS-mycV.1500-GGGS-RNF12.2
MGYPYDVPDYAPAAKRVKLDGGGSGSEVQLLESGGGLVQPGGSLRLSAAASGFTFADTDMGWFRQAPGKEREGVSAISGSGGSTYYADSVKGRFTISRDNSKNTLYLQMNSLRAEDTAVYYVAIIDDILTGGTFDEGDYWGRGTQVTVSSGGGSGLTKEQIDNLAMRSFGENDALKTCSVCITEYTEGNKLRKLPCSHEYHVHCIDRWLSENSTCPICRRAVLASGNRESVV

SEQ ID NO: 2919 - protein, 234 aa, synthetic construct
  source 1..234: note = HA-nlpNLS-RNF12.1-GGGS-mycV.1500
MGYPYDVPDYAAVKRPAATKKAGQAKKKKLDGGGSGSGLTKEQIDNLAMRSFGENDALKTCSVCITEYTEGNKLRKLPCSHEYHVHCIDRWLSENSTCPICRRAVLGGGSEVQLLESGGGLVQPGGSLRLSAAASGFTFADTDMGWFRQAPGKEREGVSAISGSGGSTYYADSVKGRFTISRDNSKNTLYLQMNSLRAEDTAVYYVAIIDDILTGGTFDEGDYWGRGTQVTVSS

SEQ ID NO: 2920 - protein, 243 aa, synthetic construct
  source 1..243: note = HA-nlpNLS-mycV.1500-GGGS-RNF12.2
MGYPYDVPDYAAVKRPAATKKAGQAKKKKLDGGGSGSEVQLLESGGGLVQPGGSLRLSAAASGFTFADTDMGWFRQAPGKEREGVSAISGSGGSTYYADSVKGRFTISRDNSKNTLYLQMNSLRAEDTAVYYVAIIDDILTGGTFDEGDYWGRGTQVTVSSGGGSGLTKEQIDNLAMRSFGENDALKTCSVCITEYTEGNKLRKLPCSHEYHVHCIDRWLSENSTCPICRRAVLASGNRESVV

SEQ ID NO: 2921 - protein, 241 aa, synthetic construct
  source 1..241: note = HA-hrpNLS-RNF12.1-GGGS-mycV.1500
MGYPYDVPDYARSGGNHRRNGRGGRGGYNRRNNGYHPYGGGSGSGLTKEQIDNLAMRSFGENDALKTCSVCITEYTEGNKLRKLPCSHEYHVHCIDRWLSENSTCPICRRAVLGGGSEVQLLESGGGLVQPGGSLRLSAAASGFTFADTDMGWFRQAPGKEREGVSAISGSGGSTYYADSVKGRFTISRDNSKNTLYLQMNSLRAEDTAVYYVAIIDDILTGGTFDEGDYWGRGTQVTVSS

SEQ ID NO: 2922 - protein, 250 aa, synthetic construct
  source 1..250: note = HA-hrpNLS-mycV.1500-GGGS-RNF12.2
MGYPYDVPDYARSGGNHRRNGRGGRGGYNRRNNGYHPYGGGSGSEVQLLESGGGLVQPGGSLRLSAAASGFTFADTDMGWFRQAPGKEREGVSAISGSGGSTYYADSVKGRFTISRDNSKNTLYLQMNSLRAEDTAVYYVAIIDDILTGGTFDEGDYWGRGTQVTVSSGGGSGLTKEQIDNLAMRSFGENDALKTCSVCITEYTEGNKLRKLPCSHEYHVHCIDRWLSENSTCPICRRAVLASGNRESVV

SEQ ID NO: 2923 - protein, 222 aa, synthetic construct
  source 1..222: note = HA-nlpNLS-mycV.1500-d-RNF4.1
MGYPYDVPDYAAVKRPAATKKAGQAKKKKLDGGGSGSEVQLLESGGGLVQPGGSLRLSAAASGFTFADTDMGWFRQAPGKEREGVSAISGSGGSTYYADSVKGRFTISRDNSKNTLYLQMNSLRAEDTAVYYVAIIDDILTGGTFDEGDYWGRGTQVTVSSVSCPICMDGYSEIVQNGRLIVSTECGHVFCSQCLRDSLKNANTCPTCRKKINHKRYHPIYI

SEQ ID NO: 2924 - protein, 239 aa, synthetic construct
  source 1..239: note = HA-nlpNLS-mycV.1500-d-RNF12.2
MGYPYDVPDYAAVKRPAATKKAGQAKKKKLDGGGSGSEVQLLESGGGLVQPGGSLRLSAAASGFTFADTDMGWFRQAPGKEREGVSAISGSGGSTYYADSVKGRFTISRDNSKNTLYLQMNSLRAEDTAVYYVAIIDDILTGGTFDEGDYWGRGTQVTVSSGLTKEQIDNLAMRSFGENDALKTCSVCITEYTEGNKLRKLPCSHEYHVHCIDRWLSENSTCPICRRAVLASGNRESVV

SEQ ID NO: 2925 - protein, 253 aa, synthetic construct
  source 1..253: note = HA-nlpNLS-mycV.1500-d-NHLRC1.1
MGYPYDVPDYAAVKRPAATKKAGQAKKKKLDGGGSGSEVQLLESGGGLVQPGGSLRLSAAASGFTFADTDMGWFRQAPGKEREGVSAISGSGGSTYYADSVKGRFTISRDNSKNTLYLQMNSLRAEDTAVYYVAIIDDILTGGTFDEGDYWGRGTQVTVSSESGPALHELMREAEISLLECKVCFEKFGHRQQRRPRNLSCGHVVCLACVAALAHPRTLALECPFCRRACRGCDTSDCLPVLHLIELLGSALR

SEQ ID NO: 2926 - protein, 257 aa, synthetic construct
  source 1..257: note = HA-nlpNLS-RNF125.2-d-mycV.1500
MGYPYDVPDYAAVKRPAATKKAGQAKKKKLDGGGSGSTSFDCAVCLEVLHQPVRTRCGHVFCRSCIATSLKNNKWTCPYCRAYLPSEGVPATDVAKRMKSEYKNCAECDTLVCLSEMRAHIRTCQKYIDKYGPEVQLLESGGGLVQPGGSLRLSAAASGFTFADTDMGWFRQAPGKEREGVSAISGSGGSTYYADSVKGRFTISRDNSKNTLYLQMNSLRAEDTAVYYVAIIDDILTGGTFDEGDYWGRGTQVTVSS

SEQ ID NO: 2927 - protein, 369 aa, synthetic construct
  source 1..369: note = HA-nlpNLS-mycV.1500-d-SPOP.2
MGYPYDVPDYAAVKRPAATKKAGQAKKKKLDGGGSGSEVQLLESGGGLVQPGGSLRLSAAASGFTFADTDMGWFRQAPGKEREGVSAISGSGGSTYYADSVKGRFTISRDNSKNTLYLQMNSLRAEDTAVYYVAIIDDILTGGTFDEGDYWGRGTQVTVSSSVNISGQNTMNMVKVPECRLADELGGLWENSRFTDCCLCVAGQEFQAHKAILAARSPVFSAMFEHEMEESKKNRVEINDVEPEVFKEMMCFIYTGKAPNLDKMADDLLAAADKYALERLKVMCEDALCSNLSVENAAEILILADLHSADQLKTQAVDFINYHASDVLETSGWKSMVVSHPHLVAEAYRSLASAQCPFLGPPRKRLKQS

SEQ ID NO: 2928 - protein, 255 aa, synthetic construct
  source 1..255: note = HA-nlpNLS-RNF125.2-d-mycV.1300
MGYPYDVPDYAAVKRPAATKKAGQAKKKKLDGGGSGSTSFDCAVCLEVLHQPVRTRCGHVFCRSCIATSLKNNKWTCPYCRAYLPSEGVPATDVAKRMKSEYKNCAECDTLVCLSEMRAHIRTCQKYIDKYGPEVQLLESGGGLVQPGGSLRLSAAASGFTFGDADMGWFRQAPGKEREGVSAISASGDSTYYADSVKGRFTISRDNSKNTLYLQMNSLRAEDTAVYYAAHLDQELTGASEHDYWGRGTQVTVSS

SEQ ID NO: 2929 - protein, 226 aa, synthetic construct
  source 1..226: note = HA-nlpNLS-mycV.1509-GGGS-RNF4.1
MGYPYDVPDYAAVKRPAATKKAGQAKKKKLDGGGSGSEVQLLESGGGLVQPGGSLRLSCAASGFTFADTDMGWFRQAPGKEREGVSAISGSGGSTYYADSVKGRFTISRDNSKNTLYLQMNSLRAEDTAVYYCAIIDDILTGGTFDEGDYWGRGTQVTVSSGGGSVSCPICMDGYSEIVQNGRLIVSTECGHVFCSQCLRDSLKNANTCPTCRKKINHKRYHPIYI

SEQ ID NO: 2930 - protein, 226 aa, synthetic construct
  source 1..226: note = HA-nlpNLS-mycV.1510-GGGS-RNF4.1
MGYPYDVPDYAAVKRPAATKKAGQAKKKKLDGGGSGSEVQLLESGGGLVQPGGSLRLSCAASGFTFADTDMGWFRQAPGKEREGVSAISGSGGSTYYADSVKGRFTISRDNSKNTLYLQMNSLRAEDTAVYYVAIIDDILTGGTFDEGDYWGRGTQVTVSSGGGSVSCPICMDGYSEIVQNGRLIVSTECGHVFCSQCLRDSLKNANTCPTCRKKINHKRYHPIYI

SEQ ID NO: 2931 - protein, 226 aa, synthetic construct
  source 1..226: note = HA-nlpNLS-mycV.1511-GGGS-RNF4.1
MGYPYDVPDYAAVKRPAATKKAGQAKKKKLDGGGSGSEVQLLESGGGLVQPGGSLRLSAAASGFTFADTDMGWFRQAPGKEREGVSAISGSGGSTYYADSVKGRFTISRDNSKNTLYLQMNSLRAEDTAVYYCAIIDDILTGGTFDEGDYWGRGTQVTVSSGGGSVSCPICMDGYSEIVQNGRLIVSTECGHVFCSQCLRDSLKNANTCPTCRKKINHKRYHPIYI

SEQ ID NO: 2932 - protein, 226 aa, synthetic construct
  source 1..226: note = HA-nlpNLS-mycV.1512-GGGS-RNF4.1
MGYPYDVPDYAAVKRPAATKKAGQAKKKKLDGGGSGSEVQLLESGGGLVQPGGSLRLSCAASGFTFADTDMGWFRQAPGKEREGVSAISGSGGSTYYADSVKGRFTISRDNSKNTLYLQMNSLRAEDTAVYYAAIIDDILTGGTFDEGDYWGRGTQVTVSSGGGSVSCPICMDGYSEIVQNGRLIVSTECGHVFCSQCLRDSLKNANTCPTCRKKINHKRYHPIYI

SEQ ID NO: 2933 - protein, 226 aa, synthetic construct
  source 1..226: note = HA-nlpNLS-mycV.1513-GGGS-RNF4.1
MGYPYDVPDYAAVKRPAATKKAGQAKKKKLDGGGSGSEVQLLESGGGLVQPGGSLRLSVAASGFTFADTDMGWFRQAPGKEREGVSAISGSGGSTYYADSVKGRFTISRDNSKNTLYLQMNSLRAEDTAVYYCAIIDDILTGGTFDEGDYWGRGTQVTVSSGGGSVSCPICMDGYSEIVQNGRLIVSTECGHVFCSQCLRDSLKNANTCPTCRKKINHKRYHPIYI

SEQ ID NO: 2934 - protein, 226 aa, synthetic construct
  source 1..226: note = HA-nlpNLS-mycV.1514-GGGS-RNF4.1
MGYPYDVPDYAAVKRPAATKKAGQAKKKKLDGGGSGSEVQLLESGGGLVQPGGSLRLSVAASGFTFADTDMGWFRQAPGKEREGVSAISGSGGSTYYADSVKGRFTISRDNSKNTLYLQMNSLRAEDTAVYYVAIIDDILTGGTFDEGDYWGRGTQVTVSSGGGSVSCPICMDGYSEIVQNGRLIVSTECGHVFCSQCLRDSLKNANTCPTCRKKINHKRYHPIYI

SEQ ID NO: 2935 - protein, 226 aa, synthetic construct
  source 1..226: note = HA-nlpNLS-mycV.1515-GGGS-RNF4.1
MGYPYDVPDYAAVKRPAATKKAGQAKKKKLDGGGSGSEVQLLESGGGLVQPGGSLRLSAAASGFTFADTDMGWFRQAPGKEREGVSAISGSGGSTYYADSVKGRFTISRDNSKNTLYLQMNSLRAEDTAVYYAAIIDDILTGGTFDEGDYWGRGTQVTVSSGGGSVSCPICMDGYSEIVQNGRLIVSTECGHVFCSQCLRDSLKNANTCPTCRKKINHKRYHPIYI

SEQ ID NO: 2936 - protein, 226 aa, synthetic construct
  source 1..226: note = HA-nlpNLS-mycV.1516-GGGS-RNF4.1
MGYPYDVPDYAAVKRPAATKKAGQAKKKKLDGGGSGSEVQLLESGGGLVQPGGSLRLSVAASGFTFADTDMGWFRQAPGKEREGVSAISGSGGSTYYADSVKGRFTISRDNSKNTLYLQMNSLRAEDTAVYYAAIIDDILTGGTFDEGDYWGRGTQVTVSSGGGSVSCPICMDGYSEIVQNGRLIVSTECGHVFCSQCLRDSLKNANTCPTCRKKINHKRYHPIYI

SEQ ID NO: 2937 - protein, 216 aa, synthetic construct
  source 1..216: note = HA-spNLS.2-mycV.1500-GGGS-RNF4.1
MGYPYDVPDYAGPPRKRLKQSGGGSGSEVQLLESGGGLVQPGGSLRLSAAASGFTFADTDMGWFRQAPGKEREGVSAISGSGGSTYYADSVKGRFTISRDNSKNTLYLQMNSLRAEDTAVYYVAIIDDILTGGTFDEGDYWGRGTQVTVSSGGGSVSCPICMDGYSEIVQNGRLIVSTECGHVFCSQCLRDSLKNANTCPTCRKKINHKRYHPIYI

SEQ ID NO: 2938 - protein, 219 aa, synthetic construct
  source 1..219: note = HA-mycV.1500-GGGS-RNF4.1-mycNLS
MGYPYDVPDYAGGGSGSEVQLLESGGGLVQPGGSLRLSAAASGFTFADTDMGWFRQAPGKEREGVSAISGSGGSTYYADSVKGRFTISRDNSKNTLYLQMNSLRAEDTAVYYVAIIDDILTGGTFDEGDYWGRGTQVTVSSGGGSVSCPICMDGYSEIVQNGRLIVSTECGHVFCSQCLRDSLKNANTCPTCRKKINHKRYHPIYIGGGSPAAKRVKLD

SEQ ID NO: 2939 - protein, 230 aa, synthetic construct
  source 1..230: note = HA-mycV.1500-GGGS-RNF4.1-nlpNLS
MGYPYDVPDYAGGGSGSEVQLLESGGGLVQPGGSLRLSAAASGFTFADTDMGWFRQAPGKEREGVSAISGSGGSTYYADSVKGRFTISRDNSKNTLYLQMNSLRAEDTAVYYVAIIDDILTGGTFDEGDYWGRGTQVTVSSGGGSVSCPICMDGYSEIVQNGRLIVSTECGHVFCSQCLRDSLKNANTCPTCRKKINHKRYHPIYIGGGSAVKRPAATKKAGQAKKKKLD

SEQ ID NO: 2940 - protein, 237 aa, synthetic construct
  source 1..237: note = HA-mycV.1500-GGGS-RNF4.1-hrpNLS
MGYPYDVPDYAGGGSGSEVQLLESGGGLVQPGGSLRLSAAASGFTFADTDMGWFRQAPGKEREGVSAISGSGGSTYYADSVKGRFTISRDNSKNTLYLQMNSLRAEDTAVYYVAIIDDILTGGTFDEGDYWGRGTQVTVSSGGGSVSCPICMDGYSEIVQNGRLIVSTECGHVFCSQCLRDSLKNANTCPTCRKKINHKRYHPIYIGGGSRSGGNHRRNGRGGRGGYNRRNNGYHPY

SEQ ID NO: 2941 - protein, 220 aa, synthetic construct
  source 1..220: note = HA-mycV.1500-GGGS-RNF4.1-spNLS.2
MGYPYDVPDYAGGGSGSEVQLLESGGGLVQPGGSLRLSAAASGFTFADTDMGWFRQAPGKEREGVSAISGSGGSTYYADSVKGRFTISRDNSKNTLYLQMNSLRAEDTAVYYVAIIDDILTGGTFDEGDYWGRGTQVTVSSGGGSVSCPICMDGYSEIVQNGRLIVSTECGHVFCSQCLRDSLKNANTCPTCRKKINHKRYHPIYIGGGSGPPRKRLKQS

SEQ ID NO: 2942 - protein, 233 aa, synthetic construct
  source 1..233: note = HA-spNLS.2-mycV.1500-RNF12.2
MGYPYDVPDYAGPPRKRLKQSGGGSGSEVQLLESGGGLVQPGGSLRLSAAASGFTFADTDMGWFRQAPGKEREGVSAISGSGGSTYYADSVKGRFTISRDNSKNTLYLQMNSLRAEDTAVYYVAIIDDILTGGTFDEGDYWGRGTQVTVSSGGGSGLTKEQIDNLAMRSFGENDALKTCSVCITEYTEGNKLRKLPCSHEYHVHCIDRWLSENSTCPICRRAVLASGNRESVV

SEQ ID NO: 2943 - protein, 236 aa, synthetic construct
  source 1..236: note = HA-mycV.1500-GGGS-RNF12.2-mycNLS
MGYPYDVPDYAGGGSGSEVQLLESGGGLVQPGGSLRLSAAASGFTFADTDMGWFRQAPGKEREGVSAISGSGGSTYYADSVKGRFTISRDNSKNTLYLQMNSLRAEDTAVYYVAIIDDILTGGTFDEGDYWGRGTQVTVSSGGGSGLTKEQIDNLAMRSFGENDALKTCSVCITEYTEGNKLRKLPCSHEYHVHCIDRWLSENSTCPICRRAVLASGNRESVVGGGSPAAKRVKLD

SEQ ID NO: 2944 - protein, 247 aa, synthetic construct
  source 1..247: note = HA-mycV.1500-GGGS-RNF12.2-nlpNLS
MGYPYDVPDYAGGGSGSEVQLLESGGGLVQPGGSLRLSAAASGFTFADTDMGWFRQAPGKEREGVSAISGSGGSTYYADSVKGRFTISRDNSKNTLYLQMNSLRAEDTAVYYVAIIDDILTGGTFDEGDYWGRGTQVTVSSGGGSGLTKEQIDNLAMRSFGENDALKTCSVCITEYTEGNKLRKLPCSHEYHVHCIDRWLSENSTCPICRRAVLASGNRESVVGGGSAVKRPAATKKAGQAKKKKLD

SEQ ID NO: 2945 - protein, 254 aa, synthetic construct
  source 1..254: note = HA-mycV.1500-GGGS-RNF12.2-hrpNLS
MGYPYDVPDYAGGGSGSEVQLLESGGGLVQPGGSLRLSAAASGFTFADTDMGWFRQAPGKEREGVSAISGSGGSTYYADSVKGRFTISRDNSKNTLYLQMNSLRAEDTAVYYVAIIDDILTGGTFDEGDYWGRGTQVTVSSGGGSGLTKEQIDNLAMRSFGENDALKTCSVCITEYTEGNKLRKLPCSHEYHVHCIDRWLSENSTCPICRRAVLASGNRESVVGGGSRSGGNHRRNGRGGRGGYNRRNNGYHPY

SEQ ID NO: 2946 - protein, 237 aa, synthetic construct
  source 1..237: note = HA-mycV.1500-GGGS-RNF12.2-spNLS.2
MGYPYDVPDYAGGGSGSEVQLLESGGGLVQPGGSLRLSAAASGFTFADTDMGWFRQAPGKEREGVSAISGSGGSTYYADSVKGRFTISRDNSKNTLYLQMNSLRAEDTAVYYVAIIDDILTGGTFDEGDYWGRGTQVTVSSGGGSGLTKEQIDNLAMRSFGENDALKTCSVCITEYTEGNKLRKLPCSHEYHVHCIDRWLSENSTCPICRRAVLASGNRESVVGGGSGPPRKRLKQS

SEQ ID NO: 2947 - protein, 251 aa, synthetic construct
  source 1..251: note = HA-spNLS.2-RNF125.2-(GGGS)1-mycV.1500
MGYPYDVPDYAGPPRKRLKQSGGGSGSTSFDCAVCLEVLHQPVRTRCGHVFCRSCIATSLKNNKWTCPYCRAYLPSEGVPATDVAKRMKSEYKNCAECDTLVCLSEMRAHIRTCQKYIDKYGPGGGSEVQLLESGGGLVQPGGSLRLSAAASGFTFADTDMGWFRQAPGKEREGVSAISGSGGSTYYADSVKGRFTISRDNSKNTLYLQMNSLRAEDTAVYYVAIIDDILTGGTFDEGDYWGRGTQVTVSS

SEQ ID NO: 2948 - protein, 254 aa, synthetic construct
  source 1..254: note = HA-RNF125.2-(GGGS)1-mycV.1500-mycNLS
MGYPYDVPDYAGGGSGSTSFDCAVCLEVLHQPVRTRCGHVFCRSCIATSLKNNKWTCPYCRAYLPSEGVPATDVAKRMKSEYKNCAECDTLVCLSEMRAHIRTCQKYIDKYGPGGGSEVQLLESGGGLVQPGGSLRLSAAASGFTFADTDMGWFRQAPGKEREGVSAISGSGGSTYYADSVKGRFTISRDNSKNTLYLQMNSLRAEDTAVYYVAIIDDILTGGTFDEGDYWGRGTQVTVSSGGGSPAAKRVKLD

SEQ ID NO: 2949 - protein, 265 aa, synthetic construct
  source 1..265: note = HA-RNF125.2-(GGGS)1-mycV.1500-nlpNLS
MGYPYDVPDYAGGGSGSTSFDCAVCLEVLHQPVRTRCGHVFCRSCIATSLKNNKWTCPYCRAYLPSEGVPATDVAKRMKSEYKNCAECDTLVCLSEMRAHIRTCQKYIDKYGPGGGSEVQLLESGGGLVQPGGSLRLSAAASGFTFADTDMGWFRQAPGKEREGVSAISGSGGSTYYADSVKGRFTISRDNSKNTLYLQMNSLRAEDTAVYYVAIIDDILTGGTFDEGDYWGRGTQVTVSSGGGSAVKRPAATKKAGQAKKKKLD

SEQ ID NO: 2950 - protein, 272 aa, synthetic construct
  source 1..272: note = HA-RNF125.2-(GGGS)1-mycV.1500-hrpNLS
MGYPYDVPDYAGGGSGSTSFDCAVCLEVLHQPVRTRCGHVFCRSCIATSLKNNKWTCPYCRAYLPSEGVPATDVAKRMKSEYKNCAECDTLVCLSEMRAHIRTCQKYIDKYGPGGGSEVQLLESGGGLVQPGGSLRLSAAASGFTFADTDMGWFRQAPGKEREGVSAISGSGGSTYYADSVKGRFTISRDNSKNTLYLQMNSLRAEDTAVYYVAIIDDILTGGTFDEGDYWGRGTQVTVSSGGGSRSGGNHRRNGRGGRGGYNRRNNGYHPY

SEQ ID NO: 2951 - protein, 255 aa, synthetic construct
  source 1..255: note = HA-RNF125.2-(GGGS)1-mycV.1500-spNLS.2
MGYPYDVPDYAGGGSGSTSFDCAVCLEVLHQPVRTRCGHVFCRSCIATSLKNNKWTCPYCRAYLPSEGVPATDVAKRMKSEYKNCAECDTLVCLSEMRAHIRTCQKYIDKYGPGGGSEVQLLESGGGLVQPGGSLRLSAAASGFTFADTDMGWFRQAPGKEREGVSAISGSGGSTYYADSVKGRFTISRDNSKNTLYLQMNSLRAEDTAVYYVAIIDDILTGGTFDEGDYWGRGTQVTVSSGGGSGPPRKRLKQS

SEQ ID NO: 2952 - protein, 224 aa, synthetic construct
  source 1..224: note = HA-mycNLS-RNF20.1-GGGS-mycV.1500
MGYPYDVPDYAPAAKRVKLDGGGSGSDEILMEEIKDYKARLTCPCCNMRKKDAVLTKCFHVFCFECVKTRYDTRQRKCPKCNAAFGANDFHRIYIGGGGSEVQLLESGGGLVQPGGSLRLSAAASGFTFADTDMGWFRQAPGKEREGVSAISGSGGSTYYADSVKGRFTISRDNSKNTLYLQMNSLRAEDTAVYYVAIIDDILTGGTFDEGDYWGRGTQVTVSS

SEQ ID NO: 2953 - protein, 224 aa, synthetic construct
  source 1..224: note = HA-mycNLS-mycV.1500-GGGS-RNF20.1
MGYPYDVPDYAPAAKRVKLDGGGSGSEVQLLESGGGLVQPGGSLRLSAAASGFTFADTDMGWFRQAPGKEREGVSAISGSGGSTYYADSVKGRFTISRDNSKNTLYLQMNSLRAEDTAVYYVAIIDDILTGGTFDEGDYWGRGTQVTVSSGGGSDEILMEEIKDYKARLTCPCCNMRKKDAVLTKCFHVFCFECVKTRYDTRQRKCPKCNAAFGANDFHRIYIG

SEQ ID NO: 2954 - protein, 235 aa, synthetic construct
  source 1..235: note = HA-nlpNLS-RNF20.1-GGGS-mycV.1500
MGYPYDVPDYAAVKRPAATKKAGQAKKKKLDGGGSGSDEILMEEIKDYKARLTCPCCNMRKKDAVLTKCFHVFCFECVKTRYDTRQRKCPKCNAAFGANDFHRIYIGGGGSEVQLLESGGGLVQPGGSLRLSAAASGFTFADTDMGWFRQAPGKEREGVSAISGSGGSTYYADSVKGRFTISRDNSKNTLYLQMNSLRAEDTAVYYVAIIDDILTGGTFDEGDYWGRGTQVTVSS

SEQ ID NO: 2955 - protein, 235 aa, synthetic construct
  source 1..235: note = HA-nlpNLS-mycV.1500-GGGS-RNF20.1
MGYPYDVPDYAAVKRPAATKKAGQAKKKKLDGGGSGSEVQLLESGGGLVQPGGSLRLSAAASGFTFADTDMGWFRQAPGKEREGVSAISGSGGSTYYADSVKGRFTISRDNSKNTLYLQMNSLRAEDTAVYYVAIIDDILTGGTFDEGDYWGRGTQVTVSSGGGSDEILMEEIKDYKARLTCPCCNMRKKDAVLTKCFHVFCFECVKTRYDTRQRKCPKCNAAFGANDFHRIYIG

SEQ ID NO: 2956 - protein, 240 aa, synthetic construct
  source 1..240: note = HA-mycNLS-ZNRF1.1-GGGS-mycV.1500
MGYPYDVPDYAPAAKRVKLDGGGSGSGFKCPICSKSVASDEMEMHFIMCLSKPRLSYNDDVLTKDAGECVICLEELLQGDTIARLPCLCIYHKSCIDSWFEVNRSCPEHPADGGGSEVQLLESGGGLVQPGGSLRLSAAASGFTFADTDMGWFRQAPGKEREGVSAISGSGGSTYYADSVKGRFTISRDNSKNTLYLQMNSLRAEDTAVYYVAIIDDILTGGTFDEGDYWGRGTQVTVSS

SEQ ID NO: 2957 - protein, 240 aa, synthetic construct
  source 1..240: note = HA-mycNLS-mycV.1500-GGGS-ZNRF1.1
MGYPYDVPDYAPAAKRVKLDGGGSGSEVQLLESGGGLVQPGGSLRLSAAASGFTFADTDMGWFRQAPGKEREGVSAISGSGGSTYYADSVKGRFTISRDNSKNTLYLQMNSLRAEDTAVYYVAIIDDILTGGTFDEGDYWGRGTQVTVSSGGGSGFKCPICSKSVASDEMEMHFIMCLSKPRLSYNDDVLTKDAGECVICLEELLQGDTIARLPCLCIYHKSCIDSWFEVNRSCPEHPAD

SEQ ID NO: 2958 - protein, 251 aa, synthetic construct
  source 1..251: note = HA-nlpNLS-ZNRF1.1-GGGS-mycV.1500
MGYPYDVPDYAAVKRPAATKKAGQAKKKKLDGGGSGSGFKCPICSKSVASDEMEMHFIMCLSKPRLSYNDDVLTKDAGECVICLEELLQGDTIARLPCLCIYHKSCIDSWFEVNRSCPEHPADGGGSEVQLLESGGGLVQPGGSLRLSAAASGFTFADTDMGWFRQAPGKEREGVSAISGSGGSTYYADSVKGRFTISRDNSKNTLYLQMNSLRAEDTAVYYVAIIDDILTGGTFDEGDYWGRGTQVTVSS

SEQ ID NO: 2959 - protein, 251 aa, synthetic construct
  source 1..251: note = HA-nlpNLS-mycV.1500-GGGS-ZNRF1.1
MGYPYDVPDYAAVKRPAATKKAGQAKKKKLDGGGSGSEVQLLESGGGLVQPGGSLRLSAAASGFTFADTDMGWFRQAPGKEREGVSAISGSGGSTYYADSVKGRFTISRDNSKNTLYLQMNSLRAEDTAVYYVAIIDDILTGGTFDEGDYWGRGTQVTVSSGGGSGFKCPICSKSVASDEMEMHFIMCLSKPRLSYNDDVLTKDAGECVICLEELLQGDTIARLPCLCIYHKSCIDSWFEVNRSCPEHPAD

SEQ ID NO: 2960 - protein, 202 aa, synthetic construct
  source 1..202: note = HA-mycNLS-ZNRF4.1-GGGS-mycV.1500
MGYPYDVPDYAPAAKRVKLDGGGSGSDLCAICLDEYEEGDQLKILPCSHTYHCKCIDPWFSQAPRRSCPVCKQSGGGSEVQLLESGGGLVQPGGSLRLSAAASGFTFADTDMGWFRQAPGKEREGVSAISGSGGSTYYADSVKGRFTISRDNSKNTLYLQMNSLRAEDTAVYYVAIIDDILTGGTFDEGDYWGRGTQVTVSS

SEQ ID NO: 2961 - protein, 202 aa, synthetic construct
  source 1..202: note = HA-mycNLS-mycV.1500-GGGS-ZNRF4.1
MGYPYDVPDYAPAAKRVKLDGGGSGSEVQLLESGGGLVQPGGSLRLSAAASGFTFADTDMGWFRQAPGKEREGVSAISGSGGSTYYADSVKGRFTISRDNSKNTLYLQMNSLRAEDTAVYYVAIIDDILTGGTFDEGDYWGRGTQVTVSSGGGSDLCAICLDEYEEGDQLKILPCSHTYHCKCIDPWFSQAPRRSCPVCKQS

SEQ ID NO: 2962 - protein, 213 aa, synthetic construct
  source 1..213: note = HA-nlpNLS-ZNRF4.1-GGGS-mycV.1500
MGYPYDVPDYAAVKRPAATKKAGQAKKKKLDGGGSGSDLCAICLDEYEEGDQLKILPCSHTYHCKCIDPWFSQAPRRSCPVCKQSGGGSEVQLLESGGGLVQPGGSLRLSAAASGFTFADTDMGWFRQAPGKEREGVSAISGSGGSTYYADSVKGRFTISRDNSKNTLYLQMNSLRAEDTAVYYVAIIDDILTGGTFDEGDYWGRGTQVTVSS

SEQ ID NO: 2963 - protein, 213 aa, synthetic construct
  source 1..213: note = HA-nlpNLS-mycV.1500-GGGS-ZNRF4.1
MGYPYDVPDYAAVKRPAATKKAGQAKKKKLDGGGSGSEVQLLESGGGLVQPGGSLRLSAAASGFTFADTDMGWFRQAPGKEREGVSAISGSGGSTYYADSVKGRFTISRDNSKNTLYLQMNSLRAEDTAVYYVAIIDDILTGGTFDEGDYWGRGTQVTVSSGGGSDLCAICLDEYEEGDQLKILPCSHTYHCKCIDPWFSQAPRRSCPVCKQS

SEQ ID NO: 2964 - protein, 208 aa, synthetic construct
  source 1..208: note = HA-mycNLS-RNF11.1-GGGS-mycV.1500
MGYPYDVPDYAPAAKRVKLDGGGSGSRECVICMMDFVYGDPIRFLPCMHIYHLDCIDDWLMRSFTCPSCMEPVDAALLSSGGGSEVQLLESGGGLVQPGGSLRLSAAASGFTFADTDMGWFRQAPGKEREGVSAISGSGGSTYYADSVKGRFTISRDNSKNTLYLQMNSLRAEDTAVYYVAIIDDILTGGTFDEGDYWGRGTQVTVSS

SEQ ID NO: 2965 - protein, 208 aa, synthetic construct
  source 1..208: note = HA-mycNLS-mycV.1500-GGGS-RNF11.1
MGYPYDVPDYAPAAKRVKLDGGGSGSEVQLLESGGGLVQPGGSLRLSAAASGFTFADTDMGWFRQAPGKEREGVSAISGSGGSTYYADSVKGRFTISRDNSKNTLYLQMNSLRAEDTAVYYVAIIDDILTGGTFDEGDYWGRGTQVTVSSGGGSRECVICMMDFVYGDPIRFLPCMHIYHLDCIDDWLMRSFTCPSCMEPVDAALLSS

SEQ ID NO: 2966 - protein, 219 aa, synthetic construct
  source 1..219: note = HA-nlpNLS-RNF11.1-GGGS-mycV.1500
MGYPYDVPDYAAVKRPAATKKAGQAKKKKLDGGGSGSRECVICMMDFVYGDPIRFLPCMHIYHLDCIDDWLMRSFTCPSCMEPVDAALLSSGGGSEVQLLESGGGLVQPGGSLRLSAAASGFTFADTDMGWFRQAPGKEREGVSAISGSGGSTYYADSVKGRFTISRDNSKNTLYLQMNSLRAEDTAVYYVAIIDDILTGGTFDEGDYWGRGTQVTVSS

SEQ ID NO: 2967 - protein, 219 aa, synthetic construct
  source 1..219: note = HA-nlpNLS-mycV.1500-GGGS-RNF11.1
MGYPYDVPDYAAVKRPAATKKAGQAKKKKLDGGGSGSEVQLLESGGGLVQPGGSLRLSAAASGFTFADTDMGWFRQAPGKEREGVSAISGSGGSTYYADSVKGRFTISRDNSKNTLYLQMNSLRAEDTAVYYVAIIDDILTGGTFDEGDYWGRGTQVTVSSGGGSRECVICMMDFVYGDPIRFLPCMHIYHLDCIDDWLMRSFTCPSCMEPVDAALLSS

SEQ ID NO: 2968 - protein, 201 aa, synthetic construct
  source 1..201: note = HA-mycNLS-RNF152.1-GGGS-mycV.1500
MGYPYDVPDYAPAAKRVKLDGGGSGSLLECQICFNYYSPRRRPKLLDCKHTCCSVCLQQMRTSQKDVRCPWCRGGGSEVQLLESGGGLVQPGGSLRLSAAASGFTFADTDMGWFRQAPGKEREGVSAISGSGGSTYYADSVKGRFTISRDNSKNTLYLQMNSLRAEDTAVYYVAIIDDILTGGTFDEGDYWGRGTQVTVSS

SEQ ID NO: 2969 - protein, 201 aa, synthetic construct
  source 1..201: note = HA-mycNLS-mycV.1500-GGGS-RNF152.1
MGYPYDVPDYAPAAKRVKLDGGGSGSEVQLLESGGGLVQPGGSLRLSAAASGFTFADTDMGWFRQAPGKEREGVSAISGSGGSTYYADSVKGRFTISRDNSKNTLYLQMNSLRAEDTAVYYVAIIDDILTGGTFDEGDYWGRGTQVTVSSGGGSLLECQICFNYYSPRRRPKLLDCKHTCCSVCLQQMRTSQKDVRCPWCR

SEQ ID NO: 2970 - protein, 212 aa, synthetic construct
  source 1..212: note = HA-nlpNLS-RNF152.1-GGGS-mycV.1500
MGYPYDVPDYAAVKRPAATKKAGQAKKKKLDGGGSGSLLECQICFNYYSPRRRPKLLDCKHTCCSVCLQQMRTSQKDVRCPWCRGGGSEVQLLESGGGLVQPGGSLRLSAAASGFTFADTDMGWFRQAPGKEREGVSAISGSGGSTYYADSVKGRFTISRDNSKNTLYLQMNSLRAEDTAVYYVAIIDDILTGGTFDEGDYWGRGTQVTVSS

SEQ ID NO: 2971 - protein, 212 aa, synthetic construct
  source 1..212: note = HA-nlpNLS-mycV.1500-GGGS-RNF152.1
MGYPYDVPDYAAVKRPAATKKAGQAKKKKLDGGGSGSEVQLLESGGGLVQPGGSLRLSAAASGFTFADTDMGWFRQAPGKEREGVSAISGSGGSTYYADSVKGRFTISRDNSKNTLYLQMNSLRAEDTAVYYVAIIDDILTGGTFDEGDYWGRGTQVTVSSGGGSLLECQICFNYYSPRRRPKLLDCKHTCCSVCLQQMRTSQKDVRCPWCR

SEQ ID NO: 2972 - protein, 210 aa, synthetic construct
  source 1..210: note = HA-mycNLS-RNF182.1-GGGS-mycV.1500
MGYPYDVPDYAPAAKRVKLDGGGSGSECKICYNRYNLKQRKPKVLECCHRVCAKCLYKIIDFGDSPQGVIVCPFCRFETCLPGGGSEVQLLESGGGLVQPGGSLRLSAAASGFTFADTDMGWFRQAPGKEREGVSAISGSGGSTYYADSVKGRFTISRDNSKNTLYLQMNSLRAEDTAVYYVAIIDDILTGGTFDEGDYWGRGTQVTVSS

SEQ ID NO: 2973 - protein, 210 aa, synthetic construct
  source 1..210: note = HA-mycNLS-mycV.1500-GGGS-RNF182.1
MGYPYDVPDYAPAAKRVKLDGGGSGSEVQLLESGGGLVQPGGSLRLSAAASGFTFADTDMGWFRQAPGKEREGVSAISGSGGSTYYADSVKGRFTISRDNSKNTLYLQMNSLRAEDTAVYYVAIIDDILTGGTFDEGDYWGRGTQVTVSSGGGSECKICYNRYNLKQRKPKVLECCHRVCAKCLYKIIDFGDSPQGVIVCPFCRFETCLP

SEQ ID NO: 2974 - protein, 221 aa, synthetic construct
  source 1..221: note = HA-nlpNLS-RNF182.1-GGGS-mycV.1500
MGYPYDVPDYAAVKRPAATKKAGQAKKKKLDGGGSGSECKICYNRYNLKQRKPKVLECCHRVCAKCLYKIIDFGDSPQGVIVCPFCRFETCLPGGGSEVQLLESGGGLVQPGGSLRLSAAASGFTFADTDMGWFRQAPGKEREGVSAISGSGGSTYYADSVKGRFTISRDNSKNTLYLQMNSLRAEDTAVYYVAIIDDILTGGTFDEGDYWGRGTQVTVSS

SEQ ID NO: 2975 - protein, 221 aa, synthetic construct
  source 1..221: note = HA-nlpNLS-mycV.1500-GGGS-RNF182.1
MGYPYDVPDYAAVKRPAATKKAGQAKKKKLDGGGSGSEVQLLESGGGLVQPGGSLRLSAAASGFTFADTDMGWFRQAPGKEREGVSAISGSGGSTYYADSVKGRFTISRDNSKNTLYLQMNSLRAEDTAVYYVAIIDDILTGGTFDEGDYWGRGTQVTVSSGGGSECKICYNRYNLKQRKPKVLECCHRVCAKCLYKIIDFGDSPQGVIVCPFCRFETCLP

SEQ ID NO: 2976 - protein, 226 aa, synthetic construct
  source 1..226: note = HA-nlpNLS-mycV.1500-(GS)2-RNF4.1
MGYPYDVPDYAAVKRPAATKKAGQAKKKKLDGGGSGSEVQLLESGGGLVQPGGSLRLSAAASGFTFADTDMGWFRQAPGKEREGVSAISGSGGSTYYADSVKGRFTISRDNSKNTLYLQMNSLRAEDTAVYYVAIIDDILTGGTFDEGDYWGRGTQVTVSSGSGSVSCPICMDGYSEIVQNGRLIVSTECGHVFCSQCLRDSLKNANTCPTCRKKINHKRYHPIYI

SEQ ID NO: 2977 - protein, 250 aa, synthetic construct
  source 1..250: note = HA-nlpNLS-mycV.1500-(GS)3-TRIM21.3
MGYPYDVPDYAAVKRPAATKKAGQAKKKKLDGSGSGSEVQLLESGGGLVQPGGSLRLSAAASGFTFADTDMGWFRQAPGKEREGVSAISGSGGSTYYADSVKGRFTISRDNSKNTLYLQMNSLRAEDTAVYYVAIIDDILTGGTFDEGDYWGRGTQVTVSSGSGSGSASAARLTMMWEEVTCPICLDPFVEPVSIECGHSFCQECISQVGKGGGSVCPVCRQRFLLKNLRPNRQLANMVNNLKEISQEAR

SEQ ID NO: 2978 - protein, 244 aa, synthetic construct
  source 1..244: note = HA-nlpNLS-mycV.1500-d-TRIM21.3
MGYPYDVPDYAAVKRPAATKKAGQAKKKKLDGSGSGSEVQLLESGGGLVQPGGSLRLSAAASGFTFADTDMGWFRQAPGKEREGVSAISGSGGSTYYADSVKGRFTISRDNSKNTLYLQMNSLRAEDTAVYYVAIIDDILTGGTFDEGDYWGRGTQVTVSSASAARLTMMWEEVTCPICLDPFVEPVSIECGHSFCQECISQVGKGGGSVCPVCRQRFLLKNLRPNRQLANMVNNLKEISQEAR

SEQ ID NO: 2979 - protein, 250 aa, synthetic construct
  source 1..250: note = HA-nlpNLS-TRIM21.3-(GS)3-mycV.1500
MGYPYDVPDYAAVKRPAATKKAGQAKKKKLDGSGSGSASAARLTMMWEEVTCPICLDPFVEPVSIECGHSFCQECISQVGKGGGSVCPVCRQRFLLKNLRPNRQLANMVNNLKEISQEARGSGSGSEVQLLESGGGLVQPGGSLRLSAAASGFTFADTDMGWFRQAPGKEREGVSAISGSGGSTYYADSVKGRFTISRDNSKNTLYLQMNSLRAEDTAVYYVAIIDDILTGGTFDEGDYWGRGTQVTVSS

SEQ ID NO: 2980 - protein, 244 aa, synthetic construct
  source 1..244: note = HA-nlpNLS-TRIM21.3-d-mycV.1500
MGYPYDVPDYAAVKRPAATKKAGQAKKKKLDGSGSGSASAARLTMMWEEVTCPICLDPFVEPVSIECGHSFCQECISQVGKGGGSVCPVCRQRFLLKNLRPNRQLANMVNNLKEISQEAREVQLLESGGGLVQPGGSLRLSAAASGFTFADTDMGWFRQAPGKEREGVSAISGSGGSTYYADSVKGRFTISRDNSKNTLYLQMNSLRAEDTAVYYVAIIDDILTGGTFDEGDYWGRGTQVTVSS

SEQ ID NO: 2981 - protein, 246 aa, synthetic construct
  source 1..246: note = HA-mycV.1500-(GS)3-TRIM21.3-spNLS.2
MGYPYDVPDYAGSGSGSEVQLLESGGGLVQPGGSLRLSAAASGFTFADTDMGWFRQAPGKEREGVSAISGSGGSTYYADSVKGRFTISRDNSKNTLYLQMNSLRAEDTAVYYVAIIDDILTGGTFDEGDYWGRGTQVTVSSGSGSGSASAARLTMMWEEVTCPICLDPFVEPVSIECGHSFCQECISQVGKGGGSVCPVCRQRFLLKNLRPNRQLANMVNNLKEISQEARGSGSGSGPPRKRLKQS

SEQ ID NO: 2982 - protein, 240 aa, synthetic construct
  source 1..240: note = HA-mycV.1500-d-TRIM21.3-spNLS.2
MGYPYDVPDYAGSGSGSEVQLLESGGGLVQPGGSLRLSAAASGFTFADTDMGWFRQAPGKEREGVSAISGSGGSTYYADSVKGRFTISRDNSKNTLYLQMNSLRAEDTAVYYVAIIDDILTGGTFDEGDYWGRGTQVTVSSASAARLTMMWEEVTCPICLDPFVEPVSIECGHSFCQECISQVGKGGGSVCPVCRQRFLLKNLRPNRQLANMVNNLKEISQEARGSGSGSGPPRKRLKQS

SEQ ID NO: 2983 - protein, 246 aa, synthetic construct
  source 1..246: note = HA-TRIM21.3-(GS)3-mycV.1500-spNLS.2
MGYPYDVPDYAGSGSGSASAARLTMMWEEVTCPICLDPFVEPVSIECGHSFCQECISQVGKGGGSVCPVCRQRFLLKNLRPNRQLANMVNNLKEISQEARGSGSGSEVQLLESGGGLVQPGGSLRLSAAASGFTFADTDMGWFRQAPGKEREGVSAISGSGGSTYYADSVKGRFTISRDNSKNTLYLQMNSLRAEDTAVYYVAIIDDILTGGTFDEGDYWGRGTQVTVSSGSGSGSGPPRKRLKQS

SEQ ID NO: 2984 - protein, 240 aa, synthetic construct
  source 1..240: note = HA-TRIM21.3-d-mycV.1500-spNLS.2
MGYPYDVPDYAGSGSGSASAARLTMMWEEVTCPICLDPFVEPVSIECGHSFCQECISQVGKGGGSVCPVCRQRFLLKNLRPNRQLANMVNNLKEISQEAREVQLLESGGGLVQPGGSLRLSAAASGFTFADTDMGWFRQAPGKEREGVSAISGSGGSTYYADSVKGRFTISRDNSKNTLYLQMNSLRAEDTAVYYVAIIDDILTGGTFDEGDYWGRGTQVTVSSGSGSGSGPPRKRLKQS

SEQ ID NO: 2985 - protein, 257 aa, synthetic construct
  source 1..257: note = HA-nlpNLS-mycV.1500-(GS)3-TRIM32.1
MGYPYDVPDYAAVKRPAATKKAGQAKKKKLDGSGSGSEVQLLESGGGLVQPGGSLRLSAAASGFTFADTDMGWFRQAPGKEREGVSAISGSGGSTYYADSVKGRFTISRDNSKNTLYLQMNSLRAEDTAVYYVAIIDDILTGGTFDEGDYWGRGTQVTVSSGSGSGSSHLNLDALREVLECPICMESFTEEQLRPKLLHCGHTICRQCLEKLLASSINGVRCPFCSKITRITSLTQLTDNLTVLKIIDTAGLSEAVG

SEQ ID NO: 2986 - protein, 251 aa, synthetic construct
  source 1..251: note = HA-nlpNLS-mycV.1500-d-TRIM32.1
MGYPYDVPDYAAVKRPAATKKAGQAKKKKLDGSGSGSEVQLLESGGGLVQPGGSLRLSAAASGFTFADTDMGWFRQAPGKEREGVSAISGSGGSTYYADSVKGRFTISRDNSKNTLYLQMNSLRAEDTAVYYVAIIDDILTGGTFDEGDYWGRGTQVTVSSSHLNLDALREVLECPICMESFTEEQLRPKLLHCGHTICRQCLEKLLASSINGVRCPFCSKITRITSLTQLTDNLTVLKIIDTAGLSEAVG

SEQ ID NO: 2987 - protein, 257 aa, synthetic construct
  source 1..257: note = HA-nlpNLS-TRIM32.1-(GS)3-mycV.1500
MGYPYDVPDYAAVKRPAATKKAGQAKKKKLDGSGSGSSHLNLDALREVLECPICMESFTEEQLRPKLLHCGHTICRQCLEKLLASSINGVRCPFCSKITRITSLTQLTDNLTVLKIIDTAGLSEAVGGSGSGSEVQLLESGGGLVQPGGSLRLSAAASGFTFADTDMGWFRQAPGKEREGVSAISGSGGSTYYADSVKGRFTISRDNSKNTLYLQMNSLRAEDTAVYYVAIIDDILTGGTFDEGDYWGRGTQVTVSS

SEQ ID NO: 2988 - protein, 251 aa, synthetic construct
  source 1..251: note = HA-nlpNLS-TRIM32.1-d-mycV.1500
MGYPYDVPDYAAVKRPAATKKAGQAKKKKLDGSGSGSSHLNLDALREVLECPICMESFTEEQLRPKLLHCGHTICRQCLEKLLASSINGVRCPFCSKITRITSLTQLTDNLTVLKIIDTAGLSEAVGEVQLLESGGGLVQPGGSLRLSAAASGFTFADTDMGWFRQAPGKEREGVSAISGSGGSTYYADSVKGRFTISRDNSKNTLYLQMNSLRAEDTAVYYVAIIDDILTGGTFDEGDYWGRGTQVTVSS

SEQ ID NO: 2989 - protein, 253 aa, synthetic construct
  source 1..253: note = HA-mycV.1500-(GS)3-TRIM32.1-spNLS.2
MGYPYDVPDYAGSGSGSEVQLLESGGGLVQPGGSLRLSAAASGFTFADTDMGWFRQAPGKEREGVSAISGSGGSTYYADSVKGRFTISRDNSKNTLYLQMNSLRAEDTAVYYVAIIDDILTGGTFDEGDYWGRGTQVTVSSGSGSGSSHLNLDALREVLECPICMESFTEEQLRPKLLHCGHTICRQCLEKLLASSINGVRCPFCSKITRITSLTQLTDNLTVLKIIDTAGLSEAVGGSGSGSGPPRKRLKQS

SEQ ID NO: 2990 - protein, 247 aa, synthetic construct
  source 1..247: note = HA-mycV.1500-d-TRIM32.1-spNLS.2
MGYPYDVPDYAGSGSGSEVQLLESGGGLVQPGGSLRLSAAASGFTFADTDMGWFRQAPGKEREGVSAISGSGGSTYYADSVKGRFTISRDNSKNTLYLQMNSLRAEDTAVYYVAIIDDILTGGTFDEGDYWGRGTQVTVSSSHLNLDALREVLECPICMESFTEEQLRPKLLHCGHTICRQCLEKLLASSINGVRCPFCSKITRITSLTQLTDNLTVLKIIDTAGLSEAVGGSGSGSGPPRKRLKQS

SEQ ID NO: 2991 - protein, 253 aa, synthetic construct
  source 1..253: note = HA-TRIM32.1-(GS)3-mycV.1500-spNLS.2
MGYPYDVPDYAGSGSGSSHLNLDALREVLECPICMESFTEEQLRPKLLHCGHTICRQCLEKLLASSINGVRCPFCSKITRITSLTQLTDNLTVLKIIDTAGLSEAVGGSGSGSEVQLLESGGGLVQPGGSLRLSAAASGFTFADTDMGWFRQAPGKEREGVSAISGSGGSTYYADSVKGRFTISRDNSKNTLYLQMNSLRAEDTAVYYVAIIDDILTGGTFDEGDYWGRGTQVTVSSGSGSGSGPPRKRLKQS

SEQ ID NO: 2992 - protein, 247 aa, synthetic construct
  source 1..247: note = HA-TRIM32.1-d-mycV.1500-spNLS.2
MGYPYDVPDYAGSGSGSSHLNLDALREVLECPICMESFTEEQLRPKLLHCGHTICRQCLEKLLASSINGVRCPFCSKITRITSLTQLTDNLTVLKIIDTAGLSEAVGEVQLLESGGGLVQPGGSLRLSAAASGFTFADTDMGWFRQAPGKEREGVSAISGSGGSTYYADSVKGRFTISRDNSKNTLYLQMNSLRAEDTAVYYVAIIDDILTGGTFDEGDYWGRGTQVTVSSGSGSGSGPPRKRLKQS

SEQ ID NO: 2993 - protein, 243 aa, synthetic construct
  source 1..243: note = HA-nlpNLS-mycV.1500-(GS)3-RNF182.2
MGYPYDVPDYAAVKRPAATKKAGQAKKKKLDGSGSGSEVQLLESGGGLVQPGGSLRLSAAASGFTFADTDMGWFRQAPGKEREGVSAISGSGGSTYYADSVKGRFTISRDNSKNTLYLQMNSLRAEDTAVYYVAIIDDILTGGTFDEGDYWGRGTQVTVSSGSGSGSELECKICYNRYNLKQRKPKVLECCHRVCAKCLYKIIDFGDSPQGVIVCPFCRFETCLPDDEVSSLPDDNNILVNLT

SEQ ID NO: 2994 - protein, 237 aa, synthetic construct
  source 1..237: note = HA-nlpNLS-mycV.1500-d-RNF182.2
MGYPYDVPDYAAVKRPAATKKAGQAKKKKLDGSGSGSEVQLLESGGGLVQPGGSLRLSAAASGFTFADTDMGWFRQAPGKEREGVSAISGSGGSTYYADSVKGRFTISRDNSKNTLYLQMNSLRAEDTAVYYVAIIDDILTGGTFDEGDYWGRGTQVTVSSELECKICYNRYNLKQRKPKVLECCHRVCAKCLYKIIDFGDSPQGVIVCPFCRFETCLPDDEVSSLPDDNNILVNLT

SEQ ID NO: 2995 - protein, 243 aa, synthetic construct
  source 1..243: note = HA-nlpNLS-RNF182.2-(GS)3-mycV.1500
MGYPYDVPDYAAVKRPAATKKAGQAKKKKLDGSGSGSELECKICYNRYNLKQRKPKVLECCHRVCAKCLYKIIDFGDSPQGVIVCPFCRFETCLPDDEVSSLPDDNNILVNLTGSGSGSEVQLLESGGGLVQPGGSLRLSAAASGFTFADTDMGWFRQAPGKEREGVSAISGSGGSTYYADSVKGRFTISRDNSKNTLYLQMNSLRAEDTAVYYVAIIDDILTGGTFDEGDYWGRGTQVTVSS

SEQ ID NO: 2996 - protein, 237 aa, synthetic construct
  source 1..237: note = HA-nlpNLS-RNF182.2-d-mycV.1500
MGYPYDVPDYAAVKRPAATKKAGQAKKKKLDGSGSGSELECKICYNRYNLKQRKPKVLECCHRVCAKCLYKIIDFGDSPQGVIVCPFCRFETCLPDDEVSSLPDDNNILVNLTEVQLLESGGGLVQPGGSLRLSAAASGFTFADTDMGWFRQAPGKEREGVSAISGSGGSTYYADSVKGRFTISRDNSKNTLYLQMNSLRAEDTAVYYVAIIDDILTGGTFDEGDYWGRGTQVTVSS

SEQ ID NO: 2997 - protein, 239 aa, synthetic construct
  source 1..239: note = HA-mycV.1500-(GS)3-RNF182.2-spNLS.2
MGYPYDVPDYAGSGSGSEVQLLESGGGLVQPGGSLRLSAAASGFTFADTDMGWFRQAPGKEREGVSAISGSGGSTYYADSVKGRFTISRDNSKNTLYLQMNSLRAEDTAVYYVAIIDDILTGGTFDEGDYWGRGTQVTVSSGSGSGSELECKICYNRYNLKQRKPKVLECCHRVCAKCLYKIIDFGDSPQGVIVCPFCRFETCLPDDEVSSLPDDNNILVNLTGSGSGSGPPRKRLKQS

SEQ ID NO: 2998 - protein, 233 aa, synthetic construct
  source 1..233: note = HA-mycV.1500-d-RNF182.2-spNLS.2
MGYPYDVPDYAGSGSGSEVQLLESGGGLVQPGGSLRLSAAASGFTFADTDMGWFRQAPGKEREGVSAISGSGGSTYYADSVKGRFTISRDNSKNTLYLQMNSLRAEDTAVYYVAIIDDILTGGTFDEGDYWGRGTQVTVSSELECKICYNRYNLKQRKPKVLECCHRVCAKCLYKIIDFGDSPQGVIVCPFCRFETCLPDDEVSSLPDDNNILVNLTGSGSGSGPPRKRLKQS

SEQ ID NO: 2999 - protein, 239 aa, synthetic construct
  source 1..239: note = HA-RNF182.2-(GS)3-mycV.1500-spNLS.2
MGYPYDVPDYAGSGSGSELECKICYNRYNLKQRKPKVLECCHRVCAKCLYKIIDFGDSPQGVIVCPFCRFETCLPDDEVSSLPDDNNILVNLTGSGSGSEVQLLESGGGLVQPGGSLRLSAAASGFTFADTDMGWFRQAPGKEREGVSAISGSGGSTYYADSVKGRFTISRDNSKNTLYLQMNSLRAEDTAVYYVAIIDDILTGGTFDEGDYWGRGTQVTVSSGSGSGSGPPRKRLKQS

SEQ ID NO: 3000 - protein, 233 aa, synthetic construct
  source 1..233: note = HA-RNF182.2-d-mycV.1500-spNLS.2
MGYPYDVPDYAGSGSGSELECKICYNRYNLKQRKPKVLECCHRVCAKCLYKIIDFGDSPQGVIVCPFCRFETCLPDDEVSSLPDDNNILVNLTEVQLLESGGGLVQPGGSLRLSAAASGFTFADTDMGWFRQAPGKEREGVSAISGSGGSTYYADSVKGRFTISRDNSKNTLYLQMNSLRAEDTAVYYVAIIDDILTGGTFDEGDYWGRGTQVTVSSGSGSGSGPPRKRLKQS

SEQ ID NO: 3001 - protein, 248 aa, synthetic construct
  source 1..248: note = HA-nlpNLS-mycV.1500-(GS)3-RNF165.1
MGYPYDVPDYAAVKRPAATKKAGQAKKKKLDGSGSGSEVQLLESGGGLVQPGGSLRLSAAASGFTFADTDMGWFRQAPGKEREGVSAISGSGGSTYYADSVKGRFTISRDNSKNTLYLQMNSLRAEDTAVYYVAIIDDILTGGTFDEGDYWGRGTQVTVSSGSGSGSNTIERFTFPHKYKKRRPQDGKGKKDEGEESDTDEKCTICLSMLEDGEDVRRLPCMHLFHQLCVDQWLAMSKKCPICRVDIE

SEQ ID NO: 3002 - protein, 242 aa, synthetic construct
  source 1..242: note = HA-nlpNLS-mycV.1500-d-RNF165.1
MGYPYDVPDYAAVKRPAATKKAGQAKKKKLDGSGSGSEVQLLESGGGLVQPGGSLRLSAAASGFTFADTDMGWFRQAPGKEREGVSAISGSGGSTYYADSVKGRFTISRDNSKNTLYLQMNSLRAEDTAVYYVAIIDDILTGGTFDEGDYWGRGTQVTVSSNTIERFTFPHKYKKRRPQDGKGKKDEGEESDTDEKCTICLSMLEDGEDVRRLPCMHLFHQLCVDQWLAMSKKCPICRVDIE

SEQ ID NO: 3003 - protein, 248 aa, synthetic construct
  source 1..248: note = HA-nlpNLS-RNF165.1-(GS)3-mycV.1500
MGYPYDVPDYAAVKRPAATKKAGQAKKKKLDGSGSGSNTIERFTFPHKYKKRRPQDGKGKKDEGEESDTDEKCTICLSMLEDGEDVRRLPCMHLFHQLCVDQWLAMSKKCPICRVDIEGSGSGSEVQLLESGGGLVQPGGSLRLSAAASGFTFADTDMGWFRQAPGKEREGVSAISGSGGSTYYADSVKGRFTISRDNSKNTLYLQMNSLRAEDTAVYYVAIIDDILTGGTFDEGDYWGRGTQVTVSS

SEQ ID NO: 3004 - protein, 242 aa, synthetic construct
  source 1..242: note = HA-nlpNLS-RNF165.1-d-mycV.1500
MGYPYDVPDYAAVKRPAATKKAGQAKKKKLDGSGSGSNTIERFTFPHKYKKRRPQDGKGKKDEGEESDTDEKCTICLSMLEDGEDVRRLPCMHLFHQLCVDQWLAMSKKCPICRVDIEEVQLLESGGGLVQPGGSLRLSAAASGFTFADTDMGWFRQAPGKEREGVSAISGSGGSTYYADSVKGRFTISRDNSKNTLYLQMNSLRAEDTAVYYVAIIDDILTGGTFDEGDYWGRGTQVTVSS

SEQ ID NO: 3005 - protein, 244 aa, synthetic construct
  source 1..244: note = HA-mycV.1500-(GS)3-RNF165.1-spNLS.2
MGYPYDVPDYAGSGSGSEVQLLESGGGLVQPGGSLRLSAAASGFTFADTDMGWFRQAPGKEREGVSAISGSGGSTYYADSVKGRFTISRDNSKNTLYLQMNSLRAEDTAVYYVAIIDDILTGGTFDEGDYWGRGTQVTVSSGSGSGSNTIERFTFPHKYKKRRPQDGKGKKDEGEESDTDEKCTICLSMLEDGEDVRRLPCMHLFHQLCVDQWLAMSKKCPICRVDIEGSGSGSGPPRKRLKQS

SEQ ID NO: 3006 - protein, 238 aa, synthetic construct
  source 1..238: note = HA-mycV.1500-d-RNF165.1-spNLS.2
MGYPYDVPDYAGSGSGSEVQLLESGGGLVQPGGSLRLSAAASGFTFADTDMGWFRQAPGKEREGVSAISGSGGSTYYADSVKGRFTISRDNSKNTLYLQMNSLRAEDTAVYYVAIIDDILTGGTFDEGDYWGRGTQVTVSSNTIERFTFPHKYKKRRPQDGKGKKDEGEESDTDEKCTICLSMLEDGEDVRRLPCMHLFHQLCVDQWLAMSKKCPICRVDIEGSGSGSGPPRKRLKQS

SEQ ID NO: 3007 - protein, 244 aa, synthetic construct
  source 1..244: note = HA-RNF165.1-(GS)3-mycV.1500-spNLS.2
MGYPYDVPDYAGSGSGSNTIERFTFPHKYKKRRPQDGKGKKDEGEESDTDEKCTICLSMLEDGEDVRRLPCMHLFHQLCVDQWLAMSKKCPICRVDIEGSGSGSEVQLLESGGGLVQPGGSLRLSAAASGFTFADTDMGWFRQAPGKEREGVSAISGSGGSTYYADSVKGRFTISRDNSKNTLYLQMNSLRAEDTAVYYVAIIDDILTGGTFDEGDYWGRGTQVTVSSGSGSGSGPPRKRLKQS

SEQ ID NO: 3008 - protein, 238 aa, synthetic construct
  source 1..238: note = HA-RNF165.1-d-mycV.1500-spNLS.2
MGYPYDVPDYAGSGSGSNTIERFTFPHKYKKRRPQDGKGKKDEGEESDTDEKCTICLSMLEDGEDVRRLPCMHLFHQLCVDQWLAMSKKCPICRVDIEEVQLLESGGGLVQPGGSLRLSAAASGFTFADTDMGWFRQAPGKEREGVSAISGSGGSTYYADSVKGRFTISRDNSKNTLYLQMNSLRAEDTAVYYVAIIDDILTGGTFDEGDYWGRGTQVTVSSGSGSGSGPPRKRLKQS

SEQ ID NO: 3009 - protein, 228 aa, synthetic construct
  source 1..228: note = HA-nlpNLS-mycV.1500-(GS)3-RNF111.1
MGYPYDVPDYAAVKRPAATKKAGQAKKKKLDGSGSGSEVQLLESGGGLVQPGGSLRLSAAASGFTFADTDMGWFRQAPGKEREGVSAISGSGGSTYYADSVKGRFTISRDNSKNTLYLQMNSLRAEDTAVYYVAIIDDILTGGTFDEGDYWGRGTQVTVSSGSGSGSTEEDTEEKCTICLSILEEGEDVRRLPCMHLFHQVCVDQWLITNKKCPICRVDIEAQLPSES

SEQ ID NO: 3010 - protein, 222 aa, synthetic construct
  source 1..222: note = HA-nlpNLS-mycV.1500-d-RNF111.1
MGYPYDVPDYAAVKRPAATKKAGQAKKKKLDGSGSGSEVQLLESGGGLVQPGGSLRLSAAASGFTFADTDMGWFRQAPGKEREGVSAISGSGGSTYYADSVKGRFTISRDNSKNTLYLQMNSLRAEDTAVYYVAIIDDILTGGTFDEGDYWGRGTQVTVSSTEEDTEEKCTICLSILEEGEDVRRLPCMHLFHQVCVDQWLITNKKCPICRVDIEAQLPSES

SEQ ID NO: 3011 - protein, 228 aa, synthetic construct
  source 1..228: note = HA-nlpNLS-RNF111.1-(GS)3-mycV.1500
MGYPYDVPDYAAVKRPAATKKAGQAKKKKLDGSGSGSTEEDTEEKCTICLSILEEGEDVRRLPCMHLFHQVCVDQWLITNKKCPICRVDIEAQLPSESGSGSGSEVQLLESGGGLVQPGGSLRLSAAASGFTFADTDMGWFRQAPGKEREGVSAISGSGGSTYYADSVKGRFTISRDNSKNTLYLQMNSLRAEDTAVYYVAIIDDILTGGTFDEGDYWGRGTQVTVSS

SEQ ID NO: 3012 - protein, 222 aa, synthetic construct
  source 1..222: note = HA-nlpNLS-RNF111.1-d-mycV.1500
MGYPYDVPDYAAVKRPAATKKAGQAKKKKLDGSGSGSTEEDTEEKCTICLSILEEGEDVRRLPCMHLFHQVCVDQWLITNKKCPICRVDIEAQLPSESEVQLLESGGGLVQPGGSLRLSAAASGFTFADTDMGWFRQAPGKEREGVSAISGSGGSTYYADSVKGRFTISRDNSKNTLYLQMNSLRAEDTAVYYVAIIDDILTGGTFDEGDYWGRGTQVTVSS

SEQ ID NO: 3013 - protein, 224 aa, synthetic construct
  source 1..224: note = HA-mycV.1500-(GS)3-RNF111.1-spNLS.2
MGYPYDVPDYAGSGSGSEVQLLESGGGLVQPGGSLRLSAAASGFTFADTDMGWFRQAPGKEREGVSAISGSGGSTYYADSVKGRFTISRDNSKNTLYLQMNSLRAEDTAVYYVAIIDDILTGGTFDEGDYWGRGTQVTVSSGSGSGSTEEDTEEKCTICLSILEEGEDVRRLPCMHLFHQVCVDQWLITNKKCPICRVDIEAQLPSESGSGSGSGPPRKRLKQS

SEQ ID NO: 3014 - protein, 218 aa, synthetic construct
  source 1..218: note = HA-mycV.1500-d-RNF111.1-spNLS.2
MGYPYDVPDYAGSGSGSEVQLLESGGGLVQPGGSLRLSAAASGFTFADTDMGWFRQAPGKEREGVSAISGSGGSTYYADSVKGRFTISRDNSKNTLYLQMNSLRAEDTAVYYVAIIDDILTGGTFDEGDYWGRGTQVTVSSTEEDTEEKCTICLSILEEGEDVRRLPCMHLFHQVCVDQWLITNKKCPICRVDIEAQLPSESGSGSGSGPPRKRLKQS

SEQ ID NO: 3015 - protein, 224 aa, synthetic construct
  source 1..224: note = HA-RNF111.1-(GS)3-mycV.1500-spNLS.2
MGYPYDVPDYAGSGSGSTEEDTEEKCTICLSILEEGEDVRRLPCMHLFHQVCVDQWLITNKKCPICRVDIEAQLPSESGSGSGSEVQLLESGGGLVQPGGSLRLSAAASGFTFADTDMGWFRQAPGKEREGVSAISGSGGSTYYADSVKGRFTISRDNSKNTLYLQMNSLRAEDTAVYYVAIIDDILTGGTFDEGDYWGRGTQVTVSSGSGSGSGPPRKRLKQS

SEQ ID NO: 3016 - protein, 218 aa, synthetic construct
  source 1..218: note = HA-RNF111.1-d-mycV.1500-spNLS.2
MGYPYDVPDYAGSGSGSTEEDTEEKCTICLSILEEGEDVRRLPCMHLFHQVCVDQWLITNKKCPICRVDIEAQLPSESEVQLLESGGGLVQPGGSLRLSAAASGFTFADTDMGWFRQAPGKEREGVSAISGSGGSTYYADSVKGRFTISRDNSKNTLYLQMNSLRAEDTAVYYVAIIDDILTGGTFDEGDYWGRGTQVTVSSGSGSGSGPPRKRLKQS

SEQ ID NO: 3017 - protein, 219 aa, synthetic construct
  source 1..219: note = HA-nlpNLS-mycV.1500-(GS)3-RNF128.1
MGYPYDVPDYAAVKRPAATKKAGQAKKKKLDGSGSGSEVQLLESGGGLVQPGGSLRLSAAASGFTFADTDMGWFRQAPGKEREGVSAISGSGGSTYYADSVKGRFTISRDNSKNTLYLQMNSLRAEDTAVYYVAIIDDILTGGTFDEGDYWGRGTQVTVSSGSGSGSDSCAVCIELYKPNDLVRILTCNHIFHKTCVDPWLLEHRTCPMCKCDILKALG

SEQ ID NO: 3018 - protein, 213 aa, synthetic construct
  source 1..213: note = HA-nlpNLS-mycV.1500-d-RNF128.1
MGYPYDVPDYAAVKRPAATKKAGQAKKKKLDGSGSGSEVQLLESGGGLVQPGGSLRLSAAASGFTFADTDMGWFRQAPGKEREGVSAISGSGGSTYYADSVKGRFTISRDNSKNTLYLQMNSLRAEDTAVYYVAIIDDILTGGTFDEGDYWGRGTQVTVSSDSCAVCIELYKPNDLVRILTCNHIFHKTCVDPWLLEHRTCPMCKCDILKALG

SEQ ID NO: 3019 - protein, 219 aa, synthetic construct
  source 1..219: note = HA-nlpNLS-RNF128.1-(GS)3-mycV.1500
MGYPYDVPDYAAVKRPAATKKAGQAKKKKLDGSGSGSDSCAVCIELYKPNDLVRILTCNHIFHKTCVDPWLLEHRTCPMCKCDILKALGGSGSGSEVQLLESGGGLVQPGGSLRLSAAASGFTFADTDMGWFRQAPGKEREGVSAISGSGGSTYYADSVKGRFTISRDNSKNTLYLQMNSLRAEDTAVYYVAIIDDILTGGTFDEGDYWGRGTQVTVSS

SEQ ID NO: 3020 - protein, 213 aa, synthetic construct
  source 1..213: note = HA-nlpNLS-RNF128.1-d-mycV.1500
MGYPYDVPDYAAVKRPAATKKAGQAKKKKLDGSGSGSDSCAVCIELYKPNDLVRILTCNHIFHKTCVDPWLLEHRTCPMCKCDILKALGEVQLLESGGGLVQPGGSLRLSAAASGFTFADTDMGWFRQAPGKEREGVSAISGSGGSTYYADSVKGRFTISRDNSKNTLYLQMNSLRAEDTAVYYVAIIDDILTGGTFDEGDYWGRGTQVTVSS

SEQ ID NO: 3021 - protein, 215 aa, synthetic construct
  source 1..215: note = HA-mycV.1500-(GS)3-RNF128.1-spNLS.2
MGYPYDVPDYAGSGSGSEVQLLESGGGLVQPGGSLRLSAAASGFTFADTDMGWFRQAPGKEREGVSAISGSGGSTYYADSVKGRFTISRDNSKNTLYLQMNSLRAEDTAVYYVAIIDDILTGGTFDEGDYWGRGTQVTVSSGSGSGSDSCAVCIELYKPNDLVRILTCNHIFHKTCVDPWLLEHRTCPMCKCDILKALGGSGSGSGPPRKRLKQS

SEQ ID NO: 3022 - protein, 209 aa, synthetic construct
  source 1..209: note = HA-mycV.1500-d-RNF128.1-spNLS.2
MGYPYDVPDYAGSGSGSEVQLLESGGGLVQPGGSLRLSAAASGFTFADTDMGWFRQAPGKEREGVSAISGSGGSTYYADSVKGRFTISRDNSKNTLYLQMNSLRAEDTAVYYVAIIDDILTGGTFDEGDYWGRGTQVTVSSDSCAVCIELYKPNDLVRILTCNHIFHKTCVDPWLLEHRTCPMCKCDILKALGGSGSGSGPPRKRLKQS

SEQ ID NO: 3023 - protein, 215 aa, synthetic construct
  source 1..215: note = HA-RNF128.1-(GS)3-mycV.1500-spNLS.2
MGYPYDVPDYAGSGSGSDSCAVCIELYKPNDLVRILTCNHIFHKTCVDPWLLEHRTCPMCKCDILKALGGSGSGSEVQLLESGGGLVQPGGSLRLSAAASGFTFADTDMGWFRQAPGKEREGVSAISGSGGSTYYADSVKGRFTISRDNSKNTLYLQMNSLRAEDTAVYYVAIIDDILTGGTFDEGDYWGRGTQVTVSSGSGSGSGPPRKRLKQS

SEQ ID NO: 3024 - protein, 209 aa, synthetic construct
  source 1..209: note = HA-RNF128.1-d-mycV.1500-spNLS.2
MGYPYDVPDYAGSGSGSDSCAVCIELYKPNDLVRILTCNHIFHKTCVDPWLLEHRTCPMCKCDILKALGEVQLLESGGGLVQPGGSLRLSAAASGFTFADTDMGWFRQAPGKEREGVSAISGSGGSTYYADSVKGRFTISRDNSKNTLYLQMNSLRAEDTAVYYVAIIDDILTGGTFDEGDYWGRGTQVTVSSGSGSGSGPPRKRLKQS

SEQ ID NO: 3025 - protein, 212 aa, synthetic construct
  source 1..212: note = HA-nlpNLS-mycV.1500-(GS)3-RNF115.1
MGYPYDVPDYAAVKRPAATKKAGQAKKKKLDGSGSGSEVQLLESGGGLVQPGGSLRLSAAASGFTFADTDMGWFRQAPGKEREGVSAISGSGGSTYYADSVKGRFTISRDNSKNTLYLQMNSLRAEDTAVYYVAIIDDILTGGTFDEGDYWGRGTQVTVSSGSGSGSLECPVCKEDYTVEEEVRQLPCNHFFHSSCIVPWLELHDTCPVCRK

SEQ ID NO: 3026 - protein, 206 aa, synthetic construct
  source 1..206: note = HA-nlpNLS-mycV.1500-d-RNF115.1
MGYPYDVPDYAAVKRPAATKKAGQAKKKKLDGSGSGSEVQLLESGGGLVQPGGSLRLSAAASGFTFADTDMGWFRQAPGKEREGVSAISGSGGSTYYADSVKGRFTISRDNSKNTLYLQMNSLRAEDTAVYYVAIIDDILTGGTFDEGDYWGRGTQVTVSSLECPVCKEDYTVEEEVRQLPCNHFFHSSCIVPWLELHDTCPVCRK

SEQ ID NO: 3027 - protein, 212 aa, synthetic construct
  source 1..212: note = HA-nlpNLS-RNF115.1-(GS)3-mycV.1500
MGYPYDVPDYAAVKRPAATKKAGQAKKKKLDGSGSGSLECPVCKEDYTVEEEVRQLPCNHFFHSSCIVPWLELHDTCPVCRKGSGSGSEVQLLESGGGLVQPGGSLRLSAAASGFTFADTDMGWFRQAPGKEREGVSAISGSGGSTYYADSVKGRFTISRDNSKNTLYLQMNSLRAEDTAVYYVAIIDDILTGGTFDEGDYWGRGTQVTVSS

SEQ ID NO: 3028 - protein, 206 aa, synthetic construct
  source 1..206: note = HA-nlpNLS-RNF115.1-d-mycV.1500
MGYPYDVPDYAAVKRPAATKKAGQAKKKKLDGSGSGSLECPVCKEDYTVEEEVRQLPCNHFFHSSCIVPWLELHDTCPVCRKEVQLLESGGGLVQPGGSLRLSAAASGFTFADTDMGWFRQAPGKEREGVSAISGSGGSTYYADSVKGRFTISRDNSKNTLYLQMNSLRAEDTAVYYVAIIDDILTGGTFDEGDYWGRGTQVTVSS

SEQ ID NO: 3029 - protein, 208 aa, synthetic construct
  source 1..208: note = HA-mycV.1500-(GS)3-RNF115.1-spNLS.2
MGYPYDVPDYAGSGSGSEVQLLESGGGLVQPGGSLRLSAAASGFTFADTDMGWFRQAPGKEREGVSAISGSGGSTYYADSVKGRFTISRDNSKNTLYLQMNSLRAEDTAVYYVAIIDDILTGGTFDEGDYWGRGTQVTVSSGSGSGSLECPVCKEDYTVEEEVRQLPCNHFFHSSCIVPWLELHDTCPVCRKGSGSGSGPPRKRLKQS

SEQ ID NO: 3030 - protein, 202 aa, synthetic construct
  source 1..202: note = HA-mycV.1500-d-RNF115.1-spNLS.2
MGYPYDVPDYAGSGSGSEVQLLESGGGLVQPGGSLRLSAAASGFTFADTDMGWFRQAPGKEREGVSAISGSGGSTYYADSVKGRFTISRDNSKNTLYLQMNSLRAEDTAVYYVAIIDDILTGGTFDEGDYWGRGTQVTVSSLECPVCKEDYTVEEEVRQLPCNHFFHSSCIVPWLELHDTCPVCRKGSGSGSGPPRKRLKQS

SEQ ID NO: 3031 - protein, 208 aa, synthetic construct
  source 1..208: note = HA-RNF115.1-(GS)3-mycV.1500-spNLS.2
MGYPYDVPDYAGSGSGSLECPVCKEDYTVEEEVRQLPCNHFFHSSCIVPWLELHDTCPVCRKGSGSGSEVQLLESGGGLVQPGGSLRLSAAASGFTFADTDMGWFRQAPGKEREGVSAISGSGGSTYYADSVKGRFTISRDNSKNTLYLQMNSLRAEDTAVYYVAIIDDILTGGTFDEGDYWGRGTQVTVSSGSGSGSGPPRKRLKQS

SEQ ID NO: 3032 - protein, 202 aa, synthetic construct
  source 1..202: note = HA-RNF115.1-d-mycV.1500-spNLS.2
MGYPYDVPDYAGSGSGSLECPVCKEDYTVEEEVRQLPCNHFFHSSCIVPWLELHDTCPVCRKEVQLLESGGGLVQPGGSLRLSAAASGFTFADTDMGWFRQAPGKEREGVSAISGSGGSTYYADSVKGRFTISRDNSKNTLYLQMNSLRAEDTAVYYVAIIDDILTGGTFDEGDYWGRGTQVTVSSGSGSGSGPPRKRLKQS

SEQ ID NO: 3033 - protein, 212 aa, synthetic construct
  source 1..212: note = HA-nlpNLS-mycV.1500-(GS)3-RNF149.1
MGYPYDVPDYAAVKRPAATKKAGQAKKKKLDGSGSGSEVQLLESGGGLVQPGGSLRLSAAASGFTFADTDMGWFRQAPGKEREGVSAISGSGGSTYYADSVKGRFTISRDNSKNTLYLQMNSLRAEDTAVYYVAIIDDILTGGTFDEGDYWGRGTQVTVSSGSGSGSENCAVCIENFKVKDIIRILPCKHIFHRICIDPWLLDHRTCPMCKL

SEQ ID NO: 3034 - protein, 206 aa, synthetic construct
  source 1..206: note = HA-nlpNLS-mycV.1500-d-RNF149.1
MGYPYDVPDYAAVKRPAATKKAGQAKKKKLDGSGSGSEVQLLESGGGLVQPGGSLRLSAAASGFTFADTDMGWFRQAPGKEREGVSAISGSGGSTYYADSVKGRFTISRDNSKNTLYLQMNSLRAEDTAVYYVAIIDDILTGGTFDEGDYWGRGTQVTVSSENCAVCIENFKVKDIIRILPCKHIFHRICIDPWLLDHRTCPMCKL

SEQ ID NO: 3035 - protein, 212 aa, synthetic construct
  source 1..212: note = HA-nlpNLS-RNF149.1-(GS)3-mycV.1500
MGYPYDVPDYAAVKRPAATKKAGQAKKKKLDGSGSGSENCAVCIENFKVKDIIRILPCKHIFHRICIDPWLLDHRTCPMCKLGSGSGSEVQLLESGGGLVQPGGSLRLSAAASGFTFADTDMGWFRQAPGKEREGVSAISGSGGSTYYADSVKGRFTISRDNSKNTLYLQMNSLRAEDTAVYYVAIIDDILTGGTFDEGDYWGRGTQVTVSS

SEQ ID NO: 3036 - protein, 206 aa, synthetic construct
  source 1..206: note = HA-nlpNLS-RNF149.1-d-mycV.1500
MGYPYDVPDYAAVKRPAATKKAGQAKKKKLDGSGSGSENCAVCIENFKVKDIIRILPCKHIFHRICIDPWLLDHRTCPMCKLEVQLLESGGGLVQPGGSLRLSAAASGFTFADTDMGWFRQAPGKEREGVSAISGSGGSTYYADSVKGRFTISRDNSKNTLYLQMNSLRAEDTAVYYVAIIDDILTGGTFDEGDYWGRGTQVTVSS

SEQ ID NO: 3037 - protein, 208 aa, synthetic construct
  source 1..208: note = HA-mycV.1500-(GS)3-RNF149.1-spNLS.2
MGYPYDVPDYAGSGSGSEVQLLESGGGLVQPGGSLRLSAAASGFTFADTDMGWFRQAPGKEREGVSAISGSGGSTYYADSVKGRFTISRDNSKNTLYLQMNSLRAEDTAVYYVAIIDDILTGGTFDEGDYWGRGTQVTVSSGSGSGSENCAVCIENFKVKDIIRILPCKHIFHRICIDPWLLDHRTCPMCKLGSGSGSGPPRKRLKQS

SEQ ID NO: 3038 - protein, 202 aa, synthetic construct
  source 1..202: note = HA-mycV.1500-d-RNF149.1-spNLS.2
MGYPYDVPDYAGSGSGSEVQLLESGGGLVQPGGSLRLSAAASGFTFADTDMGWFRQAPGKEREGVSAISGSGGSTYYADSVKGRFTISRDNSKNTLYLQMNSLRAEDTAVYYVAIIDDILTGGTFDEGDYWGRGTQVTVSSENCAVCIENFKVKDIIRILPCKHIFHRICIDPWLLDHRTCPMCKLGSGSGSGPPRKRLKQS

SEQ ID NO: 3039 - protein, 208 aa, synthetic construct
  source 1..208: note = HA-RNF149.1-(GS)3-mycV.1500-spNLS.2
MGYPYDVPDYAGSGSGSENCAVCIENFKVKDIIRILPCKHIFHRICIDPWLLDHRTCPMCKLGSGSGSEVQLLESGGGLVQPGGSLRLSAAASGFTFADTDMGWFRQAPGKEREGVSAISGSGGSTYYADSVKGRFTISRDNSKNTLYLQMNSLRAEDTAVYYVAIIDDILTGGTFDEGDYWGRGTQVTVSSGSGSGSGPPRKRLKQS

SEQ ID NO: 3040 - protein, 202 aa, synthetic construct
  source 1..202: note = HA-RNF149.1-d-mycV.1500-spNLS.2
MGYPYDVPDYAGSGSGSENCAVCIENFKVKDIIRILPCKHIFHRICIDPWLLDHRTCPMCKLEVQLLESGGGLVQPGGSLRLSAAASGFTFADTDMGWFRQAPGKEREGVSAISGSGGSTYYADSVKGRFTISRDNSKNTLYLQMNSLRAEDTAVYYVAIIDDILTGGTFDEGDYWGRGTQVTVSSGSGSGSGPPRKRLKQS

SEQ ID NO: 3041 - protein, 239 aa, synthetic construct
  source 1..239: note = HA-mycNLS-mycV.1500-(GS)3-TRIM21.3
MGYPYDVPDYAPAAKRVKLDGSGSGSEVQLLESGGGLVQPGGSLRLSAAASGFTFADTDMGWFRQAPGKEREGVSAISGSGGSTYYADSVKGRFTISRDNSKNTLYLQMNSLRAEDTAVYYVAIIDDILTGGTFDEGDYWGRGTQVTVSSGSGSGSASAARLTMMWEEVTCPICLDPFVEPVSIECGHSFCQECISQVGKGGGSVCPVCRQRFLLKNLRPNRQLANMVNNLKEISQEAR

SEQ ID NO: 3042 - protein, 233 aa, synthetic construct
  source 1..233: note = HA-mycNLS-mycV.1500-d-TRIM21.3
MGYPYDVPDYAPAAKRVKLDGSGSGSEVQLLESGGGLVQPGGSLRLSAAASGFTFADTDMGWFRQAPGKEREGVSAISGSGGSTYYADSVKGRFTISRDNSKNTLYLQMNSLRAEDTAVYYVAIIDDILTGGTFDEGDYWGRGTQVTVSSASAARLTMMWEEVTCPICLDPFVEPVSIECGHSFCQECISQVGKGGGSVCPVCRQRFLLKNLRPNRQLANMVNNLKEISQEAR

SEQ ID NO: 3043 - protein, 239 aa, synthetic construct
  source 1..239: note = HA-mycNLS-TRIM21.3-(GS)3-mycV.1500
MGYPYDVPDYAPAAKRVKLDGSGSGSASAARLTMMWEEVTCPICLDPFVEPVSIECGHSFCQECISQVGKGGGSVCPVCRQRFLLKNLRPNRQLANMVNNLKEISQEARGSGSGSEVQLLESGGGLVQPGGSLRLSAAASGFTFADTDMGWFRQAPGKEREGVSAISGSGGSTYYADSVKGRFTISRDNSKNTLYLQMNSLRAEDTAVYYVAIIDDILTGGTFDEGDYWGRGTQVTVSS

SEQ ID NO: 3044 - protein, 233 aa, synthetic construct
  source 1..233: note = HA-mycNLS-TRIM21.3-d-mycV.1500
MGYPYDVPDYAPAAKRVKLDGSGSGSASAARLTMMWEEVTCPICLDPFVEPVSIECGHSFCQECISQVGKGGGSVCPVCRQRFLLKNLRPNRQLANMVNNLKEISQEAREVQLLESGGGLVQPGGSLRLSAAASGFTFADTDMGWFRQAPGKEREGVSAISGSGGSTYYADSVKGRFTISRDNSKNTLYLQMNSLRAEDTAVYYVAIIDDILTGGTFDEGDYWGRGTQVTVSS

SEQ ID NO: 3045 - protein, 263 aa, synthetic construct
  source 1..263: note = HA-mycV.1500-(GS)3-TRIM21.3-hrpNLS
MGYPYDVPDYAGSGSGSEVQLLESGGGLVQPGGSLRLSAAASGFTFADTDMGWFRQAPGKEREGVSAISGSGGSTYYADSVKGRFTISRDNSKNTLYLQMNSLRAEDTAVYYVAIIDDILTGGTFDEGDYWGRGTQVTVSSGSGSGSASAARLTMMWEEVTCPICLDPFVEPVSIECGHSFCQECISQVGKGGGSVCPVCRQRFLLKNLRPNRQLANMVNNLKEISQEARGSGSGSRSGGNHRRNGRGGRGGYNRRNNGYHPY

SEQ ID NO: 3046 - protein, 257 aa, synthetic construct
  source 1..257: note = HA-mycV.1500-d-TRIM21.3-hrpNLS
MGYPYDVPDYAGSGSGSEVQLLESGGGLVQPGGSLRLSAAASGFTFADTDMGWFRQAPGKEREGVSAISGSGGSTYYADSVKGRFTISRDNSKNTLYLQMNSLRAEDTAVYYVAIIDDILTGGTFDEGDYWGRGTQVTVSSASAARLTMMWEEVTCPICLDPFVEPVSIECGHSFCQECISQVGKGGGSVCPVCRQRFLLKNLRPNRQLANMVNNLKEISQEARGSGSGSRSGGNHRRNGRGGRGGYNRRNNGYHPY

SEQ ID NO: 3047 - protein, 263 aa, synthetic construct
  source 1..263: note = HA-TRIM21.3-(GS)3-mycV.1500-hrpNLS
MGYPYDVPDYAGSGSGSASAARLTMMWEEVTCPICLDPFVEPVSIECGHSFCQECISQVGKGGGSVCPVCRQRFLLKNLRPNRQLANMVNNLKEISQEARGSGSGSEVQLLESGGGLVQPGGSLRLSAAASGFTFADTDMGWFRQAPGKEREGVSAISGSGGSTYYADSVKGRFTISRDNSKNTLYLQMNSLRAEDTAVYYVAIIDDILTGGTFDEGDYWGRGTQVTVSSGSGSGSRSGGNHRRNGRGGRGGYNRRNNGYHPY

SEQ ID NO: 3048 - protein, 257 aa, synthetic construct
  source 1..257: note = HA-TRIM21.3-d-mycV.1500-hrpNLS
MGYPYDVPDYAGSGSGSASAARLTMMWEEVTCPICLDPFVEPVSIECGHSFCQECISQVGKGGGSVCPVCRQRFLLKNLRPNRQLANMVNNLKEISQEAREVQLLESGGGLVQPGGSLRLSAAASGFTFADTDMGWFRQAPGKEREGVSAISGSGGSTYYADSVKGRFTISRDNSKNTLYLQMNSLRAEDTAVYYVAIIDDILTGGTFDEGDYWGRGTQVTVSSGSGSGSRSGGNHRRNGRGGRGGYNRRNNGYHPY

SEQ ID NO: 3049 - protein, 246 aa, synthetic construct
  source 1..246: note = HA-mycNLS-mycV.1500-(GS)3-TRIM32.1
MGYPYDVPDYAPAAKRVKLDGSGSGSEVQLLESGGGLVQPGGSLRLSAAASGFTFADTDMGWFRQAPGKEREGVSAISGSGGSTYYADSVKGRFTISRDNSKNTLYLQMNSLRAEDTAVYYVAIIDDILTGGTFDEGDYWGRGTQVTVSSGSGSGSSHLNLDALREVLECPICMESFTEEQLRPKLLHCGHTICRQCLEKLLASSINGVRCPFCSKITRITSLTQLTDNLTVLKIIDTAGLSEAVG

SEQ ID NO: 3050 - protein, 240 aa, synthetic construct
  source 1..240: note = HA-mycNLS-mycV.1500-d-TRIM32.1
MGYPYDVPDYAPAAKRVKLDGSGSGSEVQLLESGGGLVQPGGSLRLSAAASGFTFADTDMGWFRQAPGKEREGVSAISGSGGSTYYADSVKGRFTISRDNSKNTLYLQMNSLRAEDTAVYYVAIIDDILTGGTFDEGDYWGRGTQVTVSSSHLNLDALREVLECPICMESFTEEQLRPKLLHCGHTICRQCLEKLLASSINGVRCPFCSKITRITSLTQLTDNLTVLKIIDTAGLSEAVG

SEQ ID NO: 3051 - protein, 246 aa, synthetic construct
  source 1..246: note = HA-mycNLS-TRIM32.1-(GS)3-mycV.1500
MGYPYDVPDYAPAAKRVKLDGSGSGSSHLNLDALREVLECPICMESFTEEQLRPKLLHCGHTICRQCLEKLLASSINGVRCPFCSKITRITSLTQLTDNLTVLKIIDTAGLSEAVGGSGSGSEVQLLESGGGLVQPGGSLRLSAAASGFTFADTDMGWFRQAPGKEREGVSAISGSGGSTYYADSVKGRFTISRDNSKNTLYLQMNSLRAEDTAVYYVAIIDDILTGGTFDEGDYWGRGTQVTVSS

SEQ ID NO: 3052 - protein, 240 aa, synthetic construct
  source 1..240: note = HA-mycNLS-TRIM32.1-d-mycV.1500
MGYPYDVPDYAPAAKRVKLDGSGSGSSHLNLDALREVLECPICMESFTEEQLRPKLLHCGHTICRQCLEKLLASSINGVRCPFCSKITRITSLTQLTDNLTVLKIIDTAGLSEAVGEVQLLESGGGLVQPGGSLRLSAAASGFTFADTDMGWFRQAPGKEREGVSAISGSGGSTYYADSVKGRFTISRDNSKNTLYLQMNSLRAEDTAVYYVAIIDDILTGGTFDEGDYWGRGTQVTVSS

SEQ ID NO: 3053 - protein, 270 aa, synthetic construct
  source 1..270: note = HA-mycV.1500-(GS)3-TRIM32.1-hrpNLS
MGYPYDVPDYAGSGSGSEVQLLESGGGLVQPGGSLRLSAAASGFTFADTDMGWFRQAPGKEREGVSAISGSGGSTYYADSVKGRFTISRDNSKNTLYLQMNSLRAEDTAVYYVAIIDDILTGGTFDEGDYWGRGTQVTVSSGSGSGSSHLNLDALREVLECPICMESFTEEQLRPKLLHCGHTICRQCLEKLLASSINGVRCPFCSKITRITSLTQLTDNLTVLKIIDTAGLSEAVGGSGSGSRSGGNHRRNGRGGRGGYNRRNNGYHPY

SEQ ID NO: 3054 - protein, 264 aa, synthetic construct
  source 1..264: note = HA-mycV.1500-d-TRIM32.1-hrpNLS
MGYPYDVPDYAGSGSGSEVQLLESGGGLVQPGGSLRLSAAASGFTFADTDMGWFRQAPGKEREGVSAISGSGGSTYYADSVKGRFTISRDNSKNTLYLQMNSLRAEDTAVYYVAIIDDILTGGTFDEGDYWGRGTQVTVSSSHLNLDALREVLECPICMESFTEEQLRPKLLHCGHTICRQCLEKLLASSINGVRCPFCSKITRITSLTQLTDNLTVLKIIDTAGLSEAVGGSGSGSRSGGNHRRNGRGGRGGYNRRNNGYHPY

SEQ ID NO: 3055 - protein, 270 aa, synthetic construct
  source 1..270: note = HA-TRIM32.1-(GS)3-mycV.1500-hrpNLS
MGYPYDVPDYAGSGSGSSHLNLDALREVLECPICMESFTEEQLRPKLLHCGHTICRQCLEKLLASSINGVRCPFCSKITRITSLTQLTDNLTVLKIIDTAGLSEAVGGSGSGSEVQLLESGGGLVQPGGSLRLSAAASGFTFADTDMGWFRQAPGKEREGVSAISGSGGSTYYADSVKGRFTISRDNSKNTLYLQMNSLRAEDTAVYYVAIIDDILTGGTFDEGDYWGRGTQVTVSSGSGSGSRSGGNHRRNGRGGRGGYNRRNNGYHPY

SEQ ID NO: 3056 - protein, 264 aa, synthetic construct
  source 1..264: note = HA-TRIM32.1-d-mycV.1500-hrpNLS
MGYPYDVPDYAGSGSGSSHLNLDALREVLECPICMESFTEEQLRPKLLHCGHTICRQCLEKLLASSINGVRCPFCSKITRITSLTQLTDNLTVLKIIDTAGLSEAVGEVQLLESGGGLVQPGGSLRLSAAASGFTFADTDMGWFRQAPGKEREGVSAISGSGGSTYYADSVKGRFTISRDNSKNTLYLQMNSLRAEDTAVYYVAIIDDILTGGTFDEGDYWGRGTQVTVSSGSGSGSRSGGNHRRNGRGGRGGYNRRNNGYHPY

SEQ ID NO: 3057 - protein, 232 aa, synthetic construct
  source 1..232: note = HA-mycNLS-mycV.1500-(GS)3-RNF182.2
MGYPYDVPDYAPAAKRVKLDGSGSGSEVQLLESGGGLVQPGGSLRLSAAASGFTFADTDMGWFRQAPGKEREGVSAISGSGGSTYYADSVKGRFTISRDNSKNTLYLQMNSLRAEDTAVYYVAIIDDILTGGTFDEGDYWGRGTQVTVSSGSGSGSELECKICYNRYNLKQRKPKVLECCHRVCAKCLYKIIDFGDSPQGVIVCPFCRFETCLPDDEVSSLPDDNNILVNLT

SEQ ID NO: 3058 - protein, 226 aa, synthetic construct
  source 1..226: note = HA-mycNLS-mycV.1500-d-RNF182.2
MGYPYDVPDYAPAAKRVKLDGSGSGSEVQLLESGGGLVQPGGSLRLSAAASGFTFADTDMGWFRQAPGKEREGVSAISGSGGSTYYADSVKGRFTISRDNSKNTLYLQMNSLRAEDTAVYYVAIIDDILTGGTFDEGDYWGRGTQVTVSSELECKICYNRYNLKQRKPKVLECCHRVCAKCLYKIIDFGDSPQGVIVCPFCRFETCLPDDEVSSLPDDNNILVNLT

SEQ ID NO: 3059 - protein, 232 aa, synthetic construct
  source 1..232: note = HA-mycNLS-RNF182.2-(GS)3-mycV.1500
MGYPYDVPDYAPAAKRVKLDGSGSGSELECKICYNRYNLKQRKPKVLECCHRVCAKCLYKIIDFGDSPQGVIVCPFCRFETCLPDDEVSSLPDDNNILVNLTGSGSGSEVQLLESGGGLVQPGGSLRLSAAASGFTFADTDMGWFRQAPGKEREGVSAISGSGGSTYYADSVKGRFTISRDNSKNTLYLQMNSLRAEDTAVYYVAIIDDILTGGTFDEGDYWGRGTQVTVSS

SEQ ID NO: 3060 - protein, 226 aa, synthetic construct
  source 1..226: note = HA-mycNLS-RNF182.2-d-mycV.1500
MGYPYDVPDYAPAAKRVKLDGSGSGSELECKICYNRYNLKQRKPKVLECCHRVCAKCLYKIIDFGDSPQGVIVCPFCRFETCLPDDEVSSLPDDNNILVNLTEVQLLESGGGLVQPGGSLRLSAAASGFTFADTDMGWFRQAPGKEREGVSAISGSGGSTYYADSVKGRFTISRDNSKNTLYLQMNSLRAEDTAVYYVAIIDDILTGGTFDEGDYWGRGTQVTVSS

SEQ ID NO: 3061 - protein, 256 aa, synthetic construct
  source 1..256: note = HA-mycV.1500-(GS)3-RNF182.2-hrpNLS
MGYPYDVPDYAGSGSGSEVQLLESGGGLVQPGGSLRLSAAASGFTFADTDMGWFRQAPGKEREGVSAISGSGGSTYYADSVKGRFTISRDNSKNTLYLQMNSLRAEDTAVYYVAIIDDILTGGTFDEGDYWGRGTQVTVSSGSGSGSELECKICYNRYNLKQRKPKVLECCHRVCAKCLYKIIDFGDSPQGVIVCPFCRFETCLPDDEVSSLPDDNNILVNLTGSGSGSRSGGNHRRNGRGGRGGYNRRNNGYHPY

SEQ ID NO: 3062 - protein, 250 aa, synthetic construct
  source 1..250: note = HA-mycV.1500-d-RNF182.2-hrpNLS
MGYPYDVPDYAGSGSGSEVQLLESGGGLVQPGGSLRLSAAASGFTFADTDMGWFRQAPGKEREGVSAISGSGGSTYYADSVKGRFTISRDNSKNTLYLQMNSLRAEDTAVYYVAIIDDILTGGTFDEGDYWGRGTQVTVSSELECKICYNRYNLKQRKPKVLECCHRVCAKCLYKIIDFGDSPQGVIVCPFCRFETCLPDDEVSSLPDDNNILVNLTGSGSGSRSGGNHRRNGRGGRGGYNRRNNGYHPY

SEQ ID NO: 3063 - protein, 256 aa, synthetic construct
  source 1..256: note = HA-RNF182.2-(GS)3-mycV.1500-hrpNLS
MGYPYDVPDYAGSGSGSELECKICYNRYNLKQRKPKVLECCHRVCAKCLYKIIDFGDSPQGVIVCPFCRFETCLPDDEVSSLPDDNNILVNLTGSGSGSEVQLLESGGGLVQPGGSLRLSAAASGFTFADTDMGWFRQAPGKEREGVSAISGSGGSTYYADSVKGRFTISRDNSKNTLYLQMNSLRAEDTAVYYVAIIDDILTGGTFDEGDYWGRGTQVTVSSGSGSGSRSGGNHRRNGRGGRGGYNRRNNGYHPY

SEQ ID NO: 3064 - protein, 250 aa, synthetic construct
  source 1..250: note = HA-RNF182.2-d-mycV.1500-hrpNLS
MGYPYDVPDYAGSGSGSELECKICYNRYNLKQRKPKVLECCHRVCAKCLYKIIDFGDSPQGVIVCPFCRFETCLPDDEVSSLPDDNNILVNLTEVQLLESGGGLVQPGGSLRLSAAASGFTFADTDMGWFRQAPGKEREGVSAISGSGGSTYYADSVKGRFTISRDNSKNTLYLQMNSLRAEDTAVYYVAIIDDILTGGTFDEGDYWGRGTQVTVSSGSGSGSRSGGNHRRNGRGGRGGYNRRNNGYHPY

SEQ ID NO: 3065 - protein, 237 aa, synthetic construct
  source 1..237: note = HA-mycNLS-mycV.1500-(GS)3-RNF165.1
MGYPYDVPDYAPAAKRVKLDGSGSGSEVQLLESGGGLVQPGGSLRLSAAASGFTFADTDMGWFRQAPGKEREGVSAISGSGGSTYYADSVKGRFTISRDNSKNTLYLQMNSLRAEDTAVYYVAIIDDILTGGTFDEGDYWGRGTQVTVSSGSGSGSNTIERFTFPHKYKKRRPQDGKGKKDEGEESDTDEKCTICLSMLEDGEDVRRLPCMHLFHQLCVDQWLAMSKKCPICRVDIE

SEQ ID NO: 3066 - protein, 231 aa, synthetic construct
  source 1..231: note = HA-mycNLS-mycV.1500-d-RNF165.1
MGYPYDVPDYAPAAKRVKLDGSGSGSEVQLLESGGGLVQPGGSLRLSAAASGFTFADTDMGWFRQAPGKEREGVSAISGSGGSTYYADSVKGRFTISRDNSKNTLYLQMNSLRAEDTAVYYVAIIDDILTGGTFDEGDYWGRGTQVTVSSNTIERFTFPHKYKKRRPQDGKGKKDEGEESDTDEKCTICLSMLEDGEDVRRLPCMHLFHQLCVDQWLAMSKKCPICRVDIE

SEQ ID NO: 3067 - protein, 237 aa, synthetic construct
  source 1..237: note = HA-mycNLS-RNF165.1-(GS)3-mycV.1500
MGYPYDVPDYAPAAKRVKLDGSGSGSNTIERFTFPHKYKKRRPQDGKGKKDEGEESDTDEKCTICLSMLEDGEDVRRLPCMHLFHQLCVDQWLAMSKKCPICRVDIEGSGSGSEVQLLESGGGLVQPGGSLRLSAAASGFTFADTDMGWFRQAPGKEREGVSAISGSGGSTYYADSVKGRFTISRDNSKNTLYLQMNSLRAEDTAVYYVAIIDDILTGGTFDEGDYWGRGTQVTVSS

SEQ ID NO: 3068 - protein, 231 aa, synthetic construct
  source 1..231: note = HA-mycNLS-RNF165.1-d-mycV.1500
MGYPYDVPDYAPAAKRVKLDGSGSGSNTIERFTFPHKYKKRRPQDGKGKKDEGEESDTDEKCTICLSMLEDGEDVRRLPCMHLFHQLCVDQWLAMSKKCPICRVDIEEVQLLESGGGLVQPGGSLRLSAAASGFTFADTDMGWFRQAPGKEREGVSAISGSGGSTYYADSVKGRFTISRDNSKNTLYLQMNSLRAEDTAVYYVAIIDDILTGGTFDEGDYWGRGTQVTVSS

SEQ ID NO: 3069 - protein, 261 aa, synthetic construct
  source 1..261: note = HA-mycV.1500-(GS)3-RNF165.1-hrpNLS
MGYPYDVPDYAGSGSGSEVQLLESGGGLVQPGGSLRLSAAASGFTFADTDMGWFRQAPGKEREGVSAISGSGGSTYYADSVKGRFTISRDNSKNTLYLQMNSLRAEDTAVYYVAIIDDILTGGTFDEGDYWGRGTQVTVSSGSGSGSNTIERFTFPHKYKKRRPQDGKGKKDEGEESDTDEKCTICLSMLEDGEDVRRLPCMHLFHQLCVDQWLAMSKKCPICRVDIEGSGSGSRSGGNHRRNGRGGRGGYNRRNNGYHPY

SEQ ID NO: 3070 - protein, 255 aa, synthetic construct
  source 1..255: note = HA-mycV.1500-d-RNF165.1-hrpNLS
MGYPYDVPDYAGSGSGSEVQLLESGGGLVQPGGSLRLSAAASGFTFADTDMGWFRQAPGKEREGVSAISGSGGSTYYADSVKGRFTISRDNSKNTLYLQMNSLRAEDTAVYYVAIIDDILTGGTFDEGDYWGRGTQVTVSSNTIERFTFPHKYKKRRPQDGKGKKDEGEESDTDEKCTICLSMLEDGEDVRRLPCMHLFHQLCVDQWLAMSKKCPICRVDIEGSGSGSRSGGNHRRNGRGGRGGYNRRNNGYHPY

SEQ ID NO: 3071 - protein, 261 aa, synthetic construct
  source 1..261: note = HA-RNF165.1-(GS)3-mycV.1500-hrpNLS
MGYPYDVPDYAGSGSGSNTIERFTFPHKYKKRRPQDGKGKKDEGEESDTDEKCTICLSMLEDGEDVRRLPCMHLFHQLCVDQWLAMSKKCPICRVDIEGSGSGSEVQLLESGGGLVQPGGSLRLSAAASGFTFADTDMGWFRQAPGKEREGVSAISGSGGSTYYADSVKGRFTISRDNSKNTLYLQMNSLRAEDTAVYYVAIIDDILTGGTFDEGDYWGRGTQVTVSSGSGSGSRSGGNHRRNGRGGRGGYNRRNNGYHPY

SEQ ID NO: 3072 - protein, 255 aa, synthetic construct
  source 1..255: note = HA-RNF165.1-d-mycV.1500-hrpNLS
MGYPYDVPDYAGSGSGSNTIERFTFPHKYKKRRPQDGKGKKDEGEESDTDEKCTICLSMLEDGEDVRRLPCMHLFHQLCVDQWLAMSKKCPICRVDIEEVQLLESGGGLVQPGGSLRLSAAASGFTFADTDMGWFRQAPGKEREGVSAISGSGGSTYYADSVKGRFTISRDNSKNTLYLQMNSLRAEDTAVYYVAIIDDILTGGTFDEGDYWGRGTQVTVSSGSGSGSRSGGNHRRNGRGGRGGYNRRNNGYHPY

SEQ ID NO: 3073 - protein, 217 aa, synthetic construct
  source 1..217: note = HA-mycNLS-mycV.1500-(GS)3-RNF111.1
MGYPYDVPDYAPAAKRVKLDGSGSGSEVQLLESGGGLVQPGGSLRLSAAASGFTFADTDMGWFRQAPGKEREGVSAISGSGGSTYYADSVKGRFTISRDNSKNTLYLQMNSLRAEDTAVYYVAIIDDILTGGTFDEGDYWGRGTQVTVSSGSGSGSTEEDTEEKCTICLSILEEGEDVRRLPCMHLFHQVCVDQWLITNKKCPICRVDIEAQLPSES

SEQ ID NO: 3074 - protein, 211 aa, synthetic construct
  source 1..211: note = HA-mycNLS-mycV.1500-d-RNF111.1
MGYPYDVPDYAPAAKRVKLDGSGSGSEVQLLESGGGLVQPGGSLRLSAAASGFTFADTDMGWFRQAPGKEREGVSAISGSGGSTYYADSVKGRFTISRDNSKNTLYLQMNSLRAEDTAVYYVAIIDDILTGGTFDEGDYWGRGTQVTVSSTEEDTEEKCTICLSILEEGEDVRRLPCMHLFHQVCVDQWLITNKKCPICRVDIEAQLPSES

SEQ ID NO: 3075 - protein, 217 aa, synthetic construct
  source 1..217: note = HA-mycNLS-RNF111.1-(GS)3-mycV.1500
MGYPYDVPDYAPAAKRVKLDGSGSGSTEEDTEEKCTICLSILEEGEDVRRLPCMHLFHQVCVDQWLITNKKCPICRVDIEAQLPSESGSGSGSEVQLLESGGGLVQPGGSLRLSAAASGFTFADTDMGWFRQAPGKEREGVSAISGSGGSTYYADSVKGRFTISRDNSKNTLYLQMNSLRAEDTAVYYVAIIDDILTGGTFDEGDYWGRGTQVTVSS

SEQ ID NO: 3076 - protein, 211 aa, synthetic construct
  source 1..211: note = HA-mycNLS-RNF111.1-d-mycV.1500
MGYPYDVPDYAPAAKRVKLDGSGSGSTEEDTEEKCTICLSILEEGEDVRRLPCMHLFHQVCVDQWLITNKKCPICRVDIEAQLPSESEVQLLESGGGLVQPGGSLRLSAAASGFTFADTDMGWFRQAPGKEREGVSAISGSGGSTYYADSVKGRFTISRDNSKNTLYLQMNSLRAEDTAVYYVAIIDDILTGGTFDEGDYWGRGTQVTVSS

SEQ ID NO: 3077 - protein, 241 aa, synthetic construct
  source 1..241: note = HA-mycV.1500-(GS)3-RNF111.1-hrpNLS
MGYPYDVPDYAGSGSGSEVQLLESGGGLVQPGGSLRLSAAASGFTFADTDMGWFRQAPGKEREGVSAISGSGGSTYYADSVKGRFTISRDNSKNTLYLQMNSLRAEDTAVYYVAIIDDILTGGTFDEGDYWGRGTQVTVSSGSGSGSTEEDTEEKCTICLSILEEGEDVRRLPCMHLFHQVCVDQWLITNKKCPICRVDIEAQLPSESGSGSGSRSGGNHRRNGRGGRGGYNRRNNGYHPY

SEQ ID NO: 3078 - protein, 235 aa, synthetic construct
  source 1..235: note = HA-mycV.1500-d-RNF111.1-hrpNLS
MGYPYDVPDYAGSGSGSEVQLLESGGGLVQPGGSLRLSAAASGFTFADTDMGWFRQAPGKEREGVSAISGSGGSTYYADSVKGRFTISRDNSKNTLYLQMNSLRAEDTAVYYVAIIDDILTGGTFDEGDYWGRGTQVTVSSTEEDTEEKCTICLSILEEGEDVRRLPCMHLFHQVCVDQWLITNKKCPICRVDIEAQLPSESGSGSGSRSGGNHRRNGRGGRGGYNRRNNGYHPY

SEQ ID NO: 3079 - protein, 241 aa, synthetic construct
  source 1..241: note = HA-RNF111.1-(GS)3-mycV.1500-hrpNLS
MGYPYDVPDYAGSGSGSTEEDTEEKCTICLSILEEGEDVRRLPCMHLFHQVCVDQWLITNKKCPICRVDIEAQLPSESGSGSGSEVQLLESGGGLVQPGGSLRLSAAASGFTFADTDMGWFRQAPGKEREGVSAISGSGGSTYYADSVKGRFTISRDNSKNTLYLQMNSLRAEDTAVYYVAIIDDILTGGTFDEGDYWGRGTQVTVSSGSGSGSRSGGNHRRNGRGGRGGYNRRNNGYHPY

SEQ ID NO: 3080 - protein, 235 aa, synthetic construct
  source 1..235: note = HA-RNF111.1-d-mycV.1500-hrpNLS
MGYPYDVPDYAGSGSGSTEEDTEEKCTICLSILEEGEDVRRLPCMHLFHQVCVDQWLITNKKCPICRVDIEAQLPSESEVQLLESGGGLVQPGGSLRLSAAASGFTFADTDMGWFRQAPGKEREGVSAISGSGGSTYYADSVKGRFTISRDNSKNTLYLQMNSLRAEDTAVYYVAIIDDILTGGTFDEGDYWGRGTQVTVSSGSGSGSRSGGNHRRNGRGGRGGYNRRNNGYHPY

SEQ ID NO: 3081 - protein, 208 aa, synthetic construct
  source 1..208: note = HA-mycNLS-mycV.1500-(GS)3-RNF128.1
MGYPYDVPDYAPAAKRVKLDGSGSGSEVQLLESGGGLVQPGGSLRLSAAASGFTFADTDMGWFRQAPGKEREGVSAISGSGGSTYYADSVKGRFTISRDNSKNTLYLQMNSLRAEDTAVYYVAIIDDILTGGTFDEGDYWGRGTQVTVSSGSGSGSDSCAVCIELYKPNDLVRILTCNHIFHKTCVDPWLLEHRTCPMCKCDILKALG

SEQ ID NO: 3082 - protein, 202 aa, synthetic construct
  source 1..202: note = HA-mycNLS-mycV.1500-d-RNF128.1
MGYPYDVPDYAPAAKRVKLDGSGSGSEVQLLESGGGLVQPGGSLRLSAAASGFTFADTDMGWFRQAPGKEREGVSAISGSGGSTYYADSVKGRFTISRDNSKNTLYLQMNSLRAEDTAVYYVAIIDDILTGGTFDEGDYWGRGTQVTVSSDSCAVCIELYKPNDLVRILTCNHIFHKTCVDPWLLEHRTCPMCKCDILKALG

SEQ ID NO: 3083 - protein, 208 aa, synthetic construct
  source 1..208: note = HA-mycNLS-RNF128.1-(GS)3-mycV.1500
MGYPYDVPDYAPAAKRVKLDGSGSGSDSCAVCIELYKPNDLVRILTCNHIFHKTCVDPWLLEHRTCPMCKCDILKALGGSGSGSEVQLLESGGGLVQPGGSLRLSAAASGFTFADTDMGWFRQAPGKEREGVSAISGSGGSTYYADSVKGRFTISRDNSKNTLYLQMNSLRAEDTAVYYVAIIDDILTGGTFDEGDYWGRGTQVTVSS

SEQ ID NO: 3084 - protein, 202 aa, synthetic construct
  source 1..202: note = HA-mycNLS-RNF128.1-d-mycV.1500
MGYPYDVPDYAPAAKRVKLDGSGSGSDSCAVCIELYKPNDLVRILTCNHIFHKTCVDPWLLEHRTCPMCKCDILKALGEVQLLESGGGLVQPGGSLRLSAAASGFTFADTDMGWFRQAPGKEREGVSAISGSGGSTYYADSVKGRFTISRDNSKNTLYLQMNSLRAEDTAVYYVAIIDDILTGGTFDEGDYWGRGTQVTVSS

SEQ ID NO: 3085 - protein, 232 aa, synthetic construct
  source 1..232: note = HA-mycV.1500-(GS)3-RNF128.1-hrpNLS
MGYPYDVPDYAGSGSGSEVQLLESGGGLVQPGGSLRLSAAASGFTFADTDMGWFRQAPGKEREGVSAISGSGGSTYYADSVKGRFTISRDNSKNTLYLQMNSLRAEDTAVYYVAIIDDILTGGTFDEGDYWGRGTQVTVSSGSGSGSDSCAVCIELYKPNDLVRILTCNHIFHKTCVDPWLLEHRTCPMCKCDILKALGGSGSGSRSGGNHRRNGRGGRGGYNRRNNGYHPY

SEQ ID NO: 3086 - protein, 226 aa, synthetic construct
  source 1..226: note = HA-mycV.1500-d-RNF128.1-hrpNLS
MGYPYDVPDYAGSGSGSEVQLLESGGGLVQPGGSLRLSAAASGFTFADTDMGWFRQAPGKEREGVSAISGSGGSTYYADSVKGRFTISRDNSKNTLYLQMNSLRAEDTAVYYVAIIDDILTGGTFDEGDYWGRGTQVTVSSDSCAVCIELYKPNDLVRILTCNHIFHKTCVDPWLLEHRTCPMCKCDILKALGGSGSGSRSGGNHRRNGRGGRGGYNRRNNGYHPY

SEQ ID NO: 3087 - protein, 232 aa, synthetic construct
  source 1..232: note = HA-RNF128.1-(GS)3-mycV.1500-hrpNLS
MGYPYDVPDYAGSGSGSDSCAVCIELYKPNDLVRILTCNHIFHKTCVDPWLLEHRTCPMCKCDILKALGGSGSGSEVQLLESGGGLVQPGGSLRLSAAASGFTFADTDMGWFRQAPGKEREGVSAISGSGGSTYYADSVKGRFTISRDNSKNTLYLQMNSLRAEDTAVYYVAIIDDILTGGTFDEGDYWGRGTQVTVSSGSGSGSRSGGNHRRNGRGGRGGYNRRNNGYHPY

SEQ ID NO: 3088 - protein, 226 aa, synthetic construct
  source 1..226: note = HA-RNF128.1-d-mycV.1500-hrpNLS
MGYPYDVPDYAGSGSGSDSCAVCIELYKPNDLVRILTCNHIFHKTCVDPWLLEHRTCPMCKCDILKALGEVQLLESGGGLVQPGGSLRLSAAASGFTFADTDMGWFRQAPGKEREGVSAISGSGGSTYYADSVKGRFTISRDNSKNTLYLQMNSLRAEDTAVYYVAIIDDILTGGTFDEGDYWGRGTQVTVSSGSGSGSRSGGNHRRNGRGGRGGYNRRNNGYHPY

SEQ ID NO: 3089 - protein, 201 aa, synthetic construct
  source 1..201: note = HA-mycNLS-mycV.1500-(GS)3-RNF115.1
MGYPYDVPDYAPAAKRVKLDGSGSGSEVQLLESGGGLVQPGGSLRLSAAASGFTFADTDMGWFRQAPGKEREGVSAISGSGGSTYYADSVKGRFTISRDNSKNTLYLQMNSLRAEDTAVYYVAIIDDILTGGTFDEGDYWGRGTQVTVSSGSGSGSLECPVCKEDYTVEEEVRQLPCNHFFHSSCIVPWLELHDTCPVCRK

SEQ ID NO: 3090 - protein, 195 aa, synthetic construct
  source 1..195: note = HA-mycNLS-mycV.1500-d-RNF115.1
MGYPYDVPDYAPAAKRVKLDGSGSGSEVQLLESGGGLVQPGGSLRLSAAASGFTFADTDMGWFRQAPGKEREGVSAISGSGGSTYYADSVKGRFTISRDNSKNTLYLQMNSLRAEDTAVYYVAIIDDILTGGTFDEGDYWGRGTQVTVSSLECPVCKEDYTVEEEVRQLPCNHFFHSSCIVPWLELHDTCPVCRK

SEQ ID NO: 3091 - protein, 201 aa, synthetic construct
  source 1..201: note = HA-mycNLS-RNF115.1-(GS)3-mycV.1500
MGYPYDVPDYAPAAKRVKLDGSGSGSLECPVCKEDYTVEEEVRQLPCNHFFHSSCIVPWLELHDTCPVCRKGSGSGSEVQLLESGGGLVQPGGSLRLSAAASGFTFADTDMGWFRQAPGKEREGVSAISGSGGSTYYADSVKGRFTISRDNSKNTLYLQMNSLRAEDTAVYYVAIIDDILTGGTFDEGDYWGRGTQVTVSS

SEQ ID NO: 3092 - protein, 195 aa, synthetic construct
  source 1..195: note = HA-mycNLS-RNF115.1-d-mycV.1500
MGYPYDVPDYAPAAKRVKLDGSGSGSLECPVCKEDYTVEEEVRQLPCNHFFHSSCIVPWLELHDTCPVCRKEVQLLESGGGLVQPGGSLRLSAAASGFTFADTDMGWFRQAPGKEREGVSAISGSGGSTYYADSVKGRFTISRDNSKNTLYLQMNSLRAEDTAVYYVAIIDDILTGGTFDEGDYWGRGTQVTVSS

SEQ ID NO: 3093 - protein, 225 aa, synthetic construct
  source 1..225: note = HA-mycV.1500-(GS)3-RNF115.1-hrpNLS
MGYPYDVPDYAGSGSGSEVQLLESGGGLVQPGGSLRLSAAASGFTFADTDMGWFRQAPGKEREGVSAISGSGGSTYYADSVKGRFTISRDNSKNTLYLQMNSLRAEDTAVYYVAIIDDILTGGTFDEGDYWGRGTQVTVSSGSGSGSLECPVCKEDYTVEEEVRQLPCNHFFHSSCIVPWLELHDTCPVCRKGSGSGSRSGGNHRRNGRGGRGGYNRRNNGYHPY

SEQ ID NO: 3094 - protein, 219 aa, synthetic construct
  source 1..219: note = HA-mycV.1500-d-RNF115.1-hrpNLS
MGYPYDVPDYAGSGSGSEVQLLESGGGLVQPGGSLRLSAAASGFTFADTDMGWFRQAPGKEREGVSAISGSGGSTYYADSVKGRFTISRDNSKNTLYLQMNSLRAEDTAVYYVAIIDDILTGGTFDEGDYWGRGTQVTVSSLECPVCKEDYTVEEEVRQLPCNHFFHSSCIVPWLELHDTCPVCRKGSGSGSRSGGNHRRNGRGGRGGYNRRNNGYHPY

SEQ ID NO: 3095 - protein, 225 aa, synthetic construct
  source 1..225: note = HA-RNF115.1-(GS)3-mycV.1500-hrpNLS
MGYPYDVPDYAGSGSGSLECPVCKEDYTVEEEVRQLPCNHFFHSSCIVPWLELHDTCPVCRKGSGSGSEVQLLESGGGLVQPGGSLRLSAAASGFTFADTDMGWFRQAPGKEREGVSAISGSGGSTYYADSVKGRFTISRDNSKNTLYLQMNSLRAEDTAVYYVAIIDDILTGGTFDEGDYWGRGTQVTVSSGSGSGSRSGGNHRRNGRGGRGGYNRRNNGYHPY

SEQ ID NO: 3096 - protein, 219 aa, synthetic construct
  source 1..219: note = HA-RNF115.1-d-mycV.1500-hrpNLS
MGYPYDVPDYAGSGSGSLECPVCKEDYTVEEEVRQLPCNHFFHSSCIVPWLELHDTCPVCRKEVQLLESGGGLVQPGGSLRLSAAASGFTFADTDMGWFRQAPGKEREGVSAISGSGGSTYYADSVKGRFTISRDNSKNTLYLQMNSLRAEDTAVYYVAIIDDILTGGTFDEGDYWGRGTQVTVSSGSGSGSRSGGNHRRNGRGGRGGYNRRNNGYHPY

SEQ ID NO: 3097 - protein, 201 aa, synthetic construct
  source 1..201: note = HA-mycNLS-mycV.1500-(GS)3-RNF149.1
MGYPYDVPDYAPAAKRVKLDGSGSGSEVQLLESGGGLVQPGGSLRLSAAASGFTFADTDMGWFRQAPGKEREGVSAISGSGGSTYYADSVKGRFTISRDNSKNTLYLQMNSLRAEDTAVYYVAIIDDILTGGTFDEGDYWGRGTQVTVSSGSGSGSENCAVCIENFKVKDIIRILPCKHIFHRICIDPWLLDHRTCPMCKL

SEQ ID NO: 3098 - protein, 195 aa, synthetic construct
  source 1..195: note = HA-mycNLS-mycV.1500-d-RNF149.1
MGYPYDVPDYAPAAKRVKLDGSGSGSEVQLLESGGGLVQPGGSLRLSAAASGFTFADTDMGWFRQAPGKEREGVSAISGSGGSTYYADSVKGRFTISRDNSKNTLYLQMNSLRAEDTAVYYVAIIDDILTGGTFDEGDYWGRGTQVTVSSENCAVCIENFKVKDIIRILPCKHIFHRICIDPWLLDHRTCPMCKL

SEQ ID NO: 3099 - protein, 201 aa, synthetic construct
  source 1..201: note = HA-mycNLS-RNF149.1-(GS)3-mycV.1500
MGYPYDVPDYAPAAKRVKLDGSGSGSENCAVCIENFKVKDIIRILPCKHIFHRICIDPWLLDHRTCPMCKLGSGSGSEVQLLESGGGLVQPGGSLRLSAAASGFTFADTDMGWFRQAPGKEREGVSAISGSGGSTYYADSVKGRFTISRDNSKNTLYLQMNSLRAEDTAVYYVAIIDDILTGGTFDEGDYWGRGTQVTVSS

SEQ ID NO: 3100 - protein, 195 aa, synthetic construct
  source 1..195: note = HA-mycNLS-RNF149.1-d-mycV.1500
MGYPYDVPDYAPAAKRVKLDGSGSGSENCAVCIENFKVKDIIRILPCKHIFHRICIDPWLLDHRTCPMCKLEVQLLESGGGLVQPGGSLRLSAAASGFTFADTDMGWFRQAPGKEREGVSAISGSGGSTYYADSVKGRFTISRDNSKNTLYLQMNSLRAEDTAVYYVAIIDDILTGGTFDEGDYWGRGTQVTVSS

SEQ ID NO: 3101 - protein, 225 aa, synthetic construct
  source 1..225: note = HA-mycV.1500-(GS)3-RNF149.1-hrpNLS
MGYPYDVPDYAGSGSGSEVQLLESGGGLVQPGGSLRLSAAASGFTFADTDMGWFRQAPGKEREGVSAISGSGGSTYYADSVKGRFTISRDNSKNTLYLQMNSLRAEDTAVYYVAIIDDILTGGTFDEGDYWGRGTQVTVSSGSGSGSENCAVCIENFKVKDIIRILPCKHIFHRICIDPWLLDHRTCPMCKLGSGSGSRSGGNHRRNGRGGRGGYNRRNNGYHPY

SEQ ID NO: 3102 - protein, 219 aa, synthetic construct
  source 1..219: note = HA-mycV.1500-d-RNF149.1-hrpNLS
MGYPYDVPDYAGSGSGSEVQLLESGGGLVQPGGSLRLSAAASGFTFADTDMGWFRQAPGKEREGVSAISGSGGSTYYADSVKGRFTISRDNSKNTLYLQMNSLRAEDTAVYYVAIIDDILTGGTFDEGDYWGRGTQVTVSSENCAVCIENFKVKDIIRILPCKHIFHRICIDPWLLDHRTCPMCKLGSGSGSRSGGNHRRNGRGGRGGYNRRNNGYHPY

SEQ ID NO: 3103 - protein, 225 aa, synthetic construct
  source 1..225: note = HA-RNF149.1-(GS)3-mycV.1500-hrpNLS
MGYPYDVPDYAGSGSGSENCAVCIENFKVKDIIRILPCKHIFHRICIDPWLLDHRTCPMCKLGSGSGSEVQLLESGGGLVQPGGSLRLSAAASGFTFADTDMGWFRQAPGKEREGVSAISGSGGSTYYADSVKGRFTISRDNSKNTLYLQMNSLRAEDTAVYYVAIIDDILTGGTFDEGDYWGRGTQVTVSSGSGSGSRSGGNHRRNGRGGRGGYNRRNNGYHPY

SEQ ID NO: 3104 - protein, 219 aa, synthetic construct
  source 1..219: note = HA-RNF149.1-d-mycV.1500-hrpNLS
MGYPYDVPDYAGSGSGSENCAVCIENFKVKDIIRILPCKHIFHRICIDPWLLDHRTCPMCKLEVQLLESGGGLVQPGGSLRLSAAASGFTFADTDMGWFRQAPGKEREGVSAISGSGGSTYYADSVKGRFTISRDNSKNTLYLQMNSLRAEDTAVYYVAIIDDILTGGTFDEGDYWGRGTQVTVSSGSGSGSRSGGNHRRNGRGGRGGYNRRNNGYHPY

SEQ ID NO: 3105 - protein, 267 aa, synthetic construct
  source 1..267: note = HA-nlpNLS-mycV.1500-d-NHLRC1.4
MGYPYDVPDYAAVKRPAATKKAGQAKKKKLDGGGSGSEVQLLESGGGLVQPGGSLRLSAAASGFTFADTDMGWFRQAPGKEREGVSAISGSGGSTYYADSVKGRFTISRDNSKNTLYLQMNSLRAEDTAVYYVAIIDDILTGGTFDEGDYWGRGTQVTVSSESGPALHELMREAEISLLECKVCFEKFGHRQQRRPRNLSCGHVVCLACVAALAHPRTLALECPFCRRACRGCDTSDCLPVLHLIELLGSALRQSPAAHRAAPSAPG

SEQ ID NO: 3106 - protein, 260 aa, synthetic construct
  source 1..260: note = HA-mycNLS-mycV.1500-GGGS-NHLRC1.4
MGYPYDVPDYAPAAKRVKLDGGGSGSEVQLLESGGGLVQPGGSLRLSAAASGFTFADTDMGWFRQAPGKEREGVSAISGSGGSTYYADSVKGRFTISRDNSKNTLYLQMNSLRAEDTAVYYVAIIDDILTGGTFDEGDYWGRGTQVTVSSGGGSESGPALHELMREAEISLLECKVCFEKFGHRQQRRPRNLSCGHVVCLACVAALAHPRTLALECPFCRRACRGCDTSDCLPVLHLIELLGSALRQSPAAHRAAPSAPG

SEQ ID NO: 3107 - protein, 249 aa, synthetic construct
  source 1..249: note = HA-nlpNLS-mycV.1500-d-NHLRC1.5
MGYPYDVPDYAAVKRPAATKKAGQAKKKKLDGGGSGSEVQLLESGGGLVQPGGSLRLSAAASGFTFADTDMGWFRQAPGKEREGVSAISGSGGSTYYADSVKGRFTISRDNSKNTLYLQMNSLRAEDTAVYYVAIIDDILTGGTFDEGDYWGRGTQVTVSSALHELMREAEISLLECKVCFEKFGHRQQRRPRNLSCGHVVCLACVAALAHPRTLALECPFCRRACRGCDTSDCLPVLHLIELLGSALR

SEQ ID NO: 3108 - protein, 226 aa, synthetic construct
  source 1..226: note = HA-con1.1-SPOP.3
MYPYDVPDYAGSGSGSSAVLQKKITDYFHPKKSVNISGQNTMNMVKVPECRLADELGGLWENSRFTDCCLCVAGQEFQAHKAILAARSPVFSAMFEHEMEESKKNRVEINDVEPEVFKEMMCFIYTGKAPNLDKMADDLLAAADKYALERLKVMCEDALCSNLSVENAAEILILADLHSADQLKTQAVDFINYHASDVLETSGWKSMVVSHPHLVAEAYRSLASAQ

SEQ ID NO: 3109 - protein, 241 aa, synthetic construct
  source 1..241: note = HA-con1.1-SPOP.3-mycNLS
MYPYDVPDYAGSGSGSSAVLQKKITDYFHPKKSVNISGQNTMNMVKVPECRLADELGGLWENSRFTDCCLCVAGQEFQAHKAILAARSPVFSAMFEHEMEESKKNRVEINDVEPEVFKEMMCFIYTGKAPNLDKMADDLLAAADKYALERLKVMCEDALCSNLSVENAAEILILADLHSADQLKTQAVDFINYHASDVLETSGWKSMVVSHPHLVAEAYRSLASAQGGGSGSPAAKRVKLD

SEQ ID NO: 3110 - protein, 259 aa, synthetic construct
  source 1..259: note = HA-con1.1-SPOP.3-3xmycNLS
MYPYDVPDYAGSGSGSSAVLQKKITDYFHPKKSVNISGQNTMNMVKVPECRLADELGGLWENSRFTDCCLCVAGQEFQAHKAILAARSPVFSAMFEHEMEESKKNRVEINDVEPEVFKEMMCFIYTGKAPNLDKMADDLLAAADKYALERLKVMCEDALCSNLSVENAAEILILADLHSADQLKTQAVDFINYHASDVLETSGWKSMVVSHPHLVAEAYRSLASAQGGGSGSPAAKRVKLDPAAKRVKLDPAAKRVKLD

SEQ ID NO: 3111 - protein, 239 aa, synthetic construct
  source 1..239: note = HA-con1.1-SPOP.3-svNLS
MYPYDVPDYAGSGSGSSAVLQKKITDYFHPKKSVNISGQNTMNMVKVPECRLADELGGLWENSRFTDCCLCVAGQEFQAHKAILAARSPVFSAMFEHEMEESKKNRVEINDVEPEVFKEMMCFIYTGKAPNLDKMADDLLAAADKYALERLKVMCEDALCSNLSVENAAEILILADLHSADQLKTQAVDFINYHASDVLETSGWKSMVVSHPHLVAEAYRSLASAQGGGSGSPKKKRKV

SEQ ID NO: 3112 - protein, 255 aa, synthetic construct
  source 1..255: note = HA-con1.1-SPOP.3-3xsvNLS
MYPYDVPDYAGSGSGSSAVLQKKITDYFHPKKSVNISGQNTMNMVKVPECRLADELGGLWENSRFTDCCLCVAGQEFQAHKAILAARSPVFSAMFEHEMEESKKNRVEINDVEPEVFKEMMCFIYTGKAPNLDKMADDLLAAADKYALERLKVMCEDALCSNLSVENAAEILILADLHSADQLKTQAVDFINYHASDVLETSGWKSMVVSHPHLVAEAYRSLASAQGGGSGSPKKKRKVQPKKKRKVQPKKKRKV

SEQ ID NO: 3113 - protein, 252 aa, synthetic construct
  source 1..252: note = HA-con1.1-SPOP.3-nlpNLS
MYPYDVPDYAGSGSGSSAVLQKKITDYFHPKKSVNISGQNTMNMVKVPECRLADELGGLWENSRFTDCCLCVAGQEFQAHKAILAARSPVFSAMFEHEMEESKKNRVEINDVEPEVFKEMMCFIYTGKAPNLDKMADDLLAAADKYALERLKVMCEDALCSNLSVENAAEILILADLHSADQLKTQAVDFINYHASDVLETSGWKSMVVSHPHLVAEAYRSLASAQGGGSGSAVKRPAATKKAGQAKKKKLD

SEQ ID NO: 3114 - protein, 253 aa, synthetic construct
  source 1..253: note = HA-con1.1-SPOP.3-bpNLS
MYPYDVPDYAGSGSGSSAVLQKKITDYFHPKKSVNISGQNTMNMVKVPECRLADELGGLWENSRFTDCCLCVAGQEFQAHKAILAARSPVFSAMFEHEMEESKKNRVEINDVEPEVFKEMMCFIYTGKAPNLDKMADDLLAAADKYALERLKVMCEDALCSNLSVENAAEILILADLHSADQLKTQAVDFINYHASDVLETSGWKSMVVSHPHLVAEAYRSLASAQGGGSGSGKRKLITSEEERSPAKRGRKS

SEQ ID NO: 3115 - protein, 259 aa, synthetic construct
  source 1..259: note = HA-con1.1-SPOP.3-hrpNLS
MYPYDVPDYAGSGSGSSAVLQKKITDYFHPKKSVNISGQNTMNMVKVPECRLADELGGLWENSRFTDCCLCVAGQEFQAHKAILAARSPVFSAMFEHEMEESKKNRVEINDVEPEVFKEMMCFIYTGKAPNLDKMADDLLAAADKYALERLKVMCEDALCSNLSVENAAEILILADLHSADQLKTQAVDFINYHASDVLETSGWKSMVVSHPHLVAEAYRSLASAQGGGSGSRSGGNHRRNGRGGRGGYNRRNNGYHPY

SEQ ID NO: 3116 - protein, 233 aa, synthetic construct
  source 1..233: note = con1.1-(GS)1-CHIP.1-3xsvNLS-HA
MSAVLQKKITDYFHPKKGSRLNFGDDIPSALRIAKKKRWNSIEERRIHQESELHSYLSRLIAAERERELEECQRNHEGDEDDSHVRAQQACIEAKHDKYMADMDELFSQVDEKRKKRDIPDYLCGKISFELMREPCITPSGITYDRKDIEEHLQRVGHFDPVTRSPLTQEQLIPNLAMKEVIDAFISENGWVEDYGGGSGSPKKKRKVQPKKKRKVQPKKKRKVYPYDVPDYA

SEQ ID NO: 3117 - protein, 235 aa, synthetic construct
  source 1..235: note = con1.1-(GS)2-CHIP.1-3xsvNLS-HA
MSAVLQKKITDYFHPKKGSGSRLNFGDDIPSALRIAKKKRWNSIEERRIHQESELHSYLSRLIAAERERELEECQRNHEGDEDDSHVRAQQACIEAKHDKYMADMDELFSQVDEKRKKRDIPDYLCGKISFELMREPCITPSGITYDRKDIEEHLQRVGHFDPVTRSPLTQEQLIPNLAMKEVIDAFISENGWVEDYGGGSGSPKKKRKVQPKKKRKVQPKKKRKVYPYDVPDYA

SEQ ID NO: 3118 - protein, 237 aa, synthetic construct
  source 1..237: note = con1.1-(GS)3-CHIP.1-3xsvNLS-HA
MSAVLQKKITDYFHPKKGSGSGSRLNFGDDIPSALRIAKKKRWNSIEERRIHQESELHSYLSRLIAAERERELEECQRNHEGDEDDSHVRAQQACIEAKHDKYMADMDELFSQVDEKRKKRDIPDYLCGKISFELMREPCITPSGITYDRKDIEEHLQRVGHFDPVTRSPLTQEQLIPNLAMKEVIDAFISENGWVEDYGGGSGSPKKKRKVQPKKKRKVQPKKKRKVYPYDVPDYA

SEQ ID NO: 3119 - protein, 239 aa, synthetic construct
  source 1..239: note = con1.1-(GS)4-CHIP.1-3xsvNLS-HA
MSAVLQKKITDYFHPKKGSGSGSGSRLNFGDDIPSALRIAKKKRWNSIEERRIHQESELHSYLSRLIAAERERELEECQRNHEGDEDDSHVRAQQACIEAKHDKYMADMDELFSQVDEKRKKRDIPDYLCGKISFELMREPCITPSGITYDRKDIEEHLQRVGHFDPVTRSPLTQEQLIPNLAMKEVIDAFISENGWVEDYGGGSGSPKKKRKVQPKKKRKVQPKKKRKVYPYDVPDYA

SEQ ID NO: 3120 - protein, 241 aa, synthetic construct
  source 1..241: note = con1.1-(GS)5-CHIP.1-3xsvNLS-HA
MSAVLQKKITDYFHPKKGSGSGSGSGSRLNFGDDIPSALRIAKKKRWNSIEERRIHQESELHSYLSRLIAAERERELEECQRNHEGDEDDSHVRAQQACIEAKHDKYMADMDELFSQVDEKRKKRDIPDYLCGKISFELMREPCITPSGITYDRKDIEEHLQRVGHFDPVTRSPLTQEQLIPNLAMKEVIDAFISENGWVEDYGGGSGSPKKKRKVQPKKKRKVQPKKKRKVYPYDVPDYA

SEQ ID NO: 3121 - protein, 243 aa, synthetic construct
  source 1..243: note = con1.1-(GS)6-CHIP.1-3xsvNLS-HA
MSAVLQKKITDYFHPKKGSGSGSGSGSGSRLNFGDDIPSALRIAKKKRWNSIEERRIHQESELHSYLSRLIAAERERELEECQRNHEGDEDDSHVRAQQACIEAKHDKYMADMDELFSQVDEKRKKRDIPDYLCGKISFELMREPCITPSGITYDRKDIEEHLQRVGHFDPVTRSPLTQEQLIPNLAMKEVIDAFISENGWVEDYGGGSGSPKKKRKVQPKKKRKVQPKKKRKVYPYDVPDYA

SEQ ID NO: 3122 - protein, 92 aa, synthetic construct
  source 1..92: note = HA-3xsvNLS-DCAF1.1-(GS)1-con1.1
MYPYDVPDYAPKKKRKVQPKKKRKVQPKKKRKVGGGSGSQAPINFTSRLNRRASFPKYGGVDGGCFDRHLIFSRGSSAVLQKKITDYFHPKK

SEQ ID NO: 3123 - protein, 94 aa, synthetic construct
  source 1..94: note = HA-3xsvNLS-DCAF1.1-(GS)2-con1.1
MYPYDVPDYAPKKKRKVQPKKKRKVQPKKKRKVGGGSGSQAPINFTSRLNRRASFPKYGGVDGGCFDRHLIFSRGSGSSAVLQKKITDYFHPKK

SEQ ID NO: 3124 - protein, 96 aa, synthetic construct
  source 1..96: note = HA-3xsvNLS-DCAF1.1-(GS)3-con1.1
MYPYDVPDYAPKKKRKVQPKKKRKVQPKKKRKVGGGSGSQAPINFTSRLNRRASFPKYGGVDGGCFDRHLIFSRGSGSGSSAVLQKKITDYFHPKK

SEQ ID NO: 3125 - protein, 99 aa, synthetic construct
  source 1..99: note = HA-3xsvNLS-DCAF1.1-(GS)4-con1.1
MYPYDVPDYAPKKKRKVQPKKKRKVQPKKKRKVGGGSGSSQAPINFTSRLNRRASFPKYGGVDGGCFDRHLIFSRGSGSGSGSSAVLQKKITDYFHPKK

SEQ ID NO: 3126 - protein, 100 aa, synthetic construct
  source 1..100: note = HA-3xsvNLS-DCAF1.1-(GS)5-con1.1
MYPYDVPDYAPKKKRKVQPKKKRKVQPKKKRKVGGGSGSQAPINFTSRLNRRASFPKYGGVDGGCFDRHLIFSRGSGSGSGSGSSAVLQKKITDYFHPKK

SEQ ID NO: 3127 - protein, 102 aa, synthetic construct
  source 1..102: note = HA-3xsvNLS-DCAF1.1-(GS)6-con1.1
MYPYDVPDYAPKKKRKVQPKKKRKVQPKKKRKVGGGSGSQAPINFTSRLNRRASFPKYGGVDGGCFDRHLIFSRGSGSGSGSGSGSSAVLQKKITDYFHPKK

SEQ ID NO: 3128 - protein, 413 aa, synthetic construct
  source 1..413: note = HA-3xsvNLS-con1.1-(GS)1-E6AP.1
MYPYDVPDYAPKKKRKVQPKKKRKVQPKKKRKVGGGSGSSAVLQKKITDYFHPKKGSNPYLRLKVRRDHIIDDALVRLEMIAMENPADLKKQLYVEFEGEQGVDEGGVSKEFFQLVVEEIFNPDIGMFTYDESTKLFWFNPSSFETEGQFTLIGIVLGLAIYNNCILDVHFPMVVYRKLMGKKGTFRDLGDSHPVLYQSLKDLLEYEGNVEDDMMITFQISQTDLFGNPMMYDLKENGDKIPITNENRKEFVNLYSDYILNKSVEKQFKAFRRGFHMVTNESPLKYLFRPEEIELLICGSRNLDFQALEETTEYDGGYTRDSVLIREFWEIVHSFTDEQKRLFLQFTTGTDRAPVGGLGKLKMIIAKNGPDTERLPTSHTCFNVLLLPEYSSKEKLKERLLKAITYAKGFGML

SEQ ID NO: 3129 - protein, 415 aa, synthetic construct
  source 1..415: note = HA-3xsvNLS-con1.1-(GS)2-E6AP.1
MYPYDVPDYAPKKKRKVQPKKKRKVQPKKKRKVGGGSGSSAVLQKKITDYFHPKKGSGSNPYLRLKVRRDHIIDDALVRLEMIAMENPADLKKQLYVEFEGEQGVDEGGVSKEFFQLVVEEIFNPDIGMFTYDESTKLFWFNPSSFETEGQFTLIGIVLGLAIYNNCILDVHFPMVVYRKLMGKKGTFRDLGDSHPVLYQSLKDLLEYEGNVEDDMMITFQISQTDLFGNPMMYDLKENGDKIPITNENRKEFVNLYSDYILNKSVEKQFKAFRRGFHMVTNESPLKYLFRPEEIELLICGSRNLDFQALEETTEYDGGYTRDSVLIREFWEIVHSFTDEQKRLFLQFTTGTDRAPVGGLGKLKMIIAKNGPDTERLPTSHTCFNVLLLPEYSSKEKLKERLLKAITYAKGFGML

SEQ ID NO: 3130 - protein, 417 aa, synthetic construct
  source 1..417: note = HA-3xsvNLS-con1.1-(GS)3-E6AP.1
MYPYDVPDYAPKKKRKVQPKKKRKVQPKKKRKVGGGSGSSAVLQKKITDYFHPKKGSGSGSNPYLRLKVRRDHIIDDALVRLEMIAMENPADLKKQLYVEFEGEQGVDEGGVSKEFFQLVVEEIFNPDIGMFTYDESTKLFWFNPSSFETEGQFTLIGIVLGLAIYNNCILDVHFPMVVYRKLMGKKGTFRDLGDSHPVLYQSLKDLLEYEGNVEDDMMITFQISQTDLFGNPMMYDLKENGDKIPITNENRKEFVNLYSDYILNKSVEKQFKAFRRGFHMVTNESPLKYLFRPEEIELLICGSRNLDFQALEETTEYDGGYTRDSVLIREFWEIVHSFTDEQKRLFLQFTTGTDRAPVGGLGKLKMIIAKNGPDTERLPTSHTCFNVLLLPEYSSKEKLKERLLKAITYAKGFGML

SEQ ID NO: 3131 - protein, 419 aa, synthetic construct
  source 1..419: note = HA-3xsvNLS-con1.1-(GS)4-E6AP.1
MYPYDVPDYAPKKKRKVQPKKKRKVQPKKKRKVGGGSGSSAVLQKKITDYFHPKKGSGSGSGSNPYLRLKVRRDHIIDDALVRLEMIAMENPADLKKQLYVEFEGEQGVDEGGVSKEFFQLVVEEIFNPDIGMFTYDESTKLFWFNPSSFETEGQFTLIGIVLGLAIYNNCILDVHFPMVVYRKLMGKKGTFRDLGDSHPVLYQSLKDLLEYEGNVEDDMMITFQISQTDLFGNPMMYDLKENGDKIPITNENRKEFVNLYSDYILNKSVEKQFKAFRRGFHMVTNESPLKYLFRPEEIELLICGSRNLDFQALEETTEYDGGYTRDSVLIREFWEIVHSFTDEQKRLFLQFTTGTDRAPVGGLGKLKMIIAKNGPDTERLPTSHTCFNVLLLPEYSSKEKLKERLLKAITYAKGFGML

SEQ ID NO: 3132 - protein, 421 aa, synthetic construct
  source 1..421: note = HA-3xsvNLS-con1.1-(GS)5-E6AP.1
MYPYDVPDYAPKKKRKVQPKKKRKVQPKKKRKVGGGSGSSAVLQKKITDYFHPKKGSGSGSGSGSNPYLRLKVRRDHIIDDALVRLEMIAMENPADLKKQLYVEFEGEQGVDEGGVSKEFFQLVVEEIFNPDIGMFTYDESTKLFWFNPSSFETEGQFTLIGIVLGLAIYNNCILDVHFPMVVYRKLMGKKGTFRDLGDSHPVLYQSLKDLLEYEGNVEDDMMITFQISQTDLFGNPMMYDLKENGDKIPITNENRKEFVNLYSDYILNKSVEKQFKAFRRGFHMVTNESPLKYLFRPEEIELLICGSRNLDFQALEETTEYDGGYTRDSVLIREFWEIVHSFTDEQKRLFLQFTTGTDRAPVGGLGKLKMIIAKNGPDTERLPTSHTCFNVLLLPEYSSKEKLKERLLKAITYAKGFGML

SEQ ID NO: 3133 - protein, 423 aa, synthetic construct
  source 1..423: note = HA-3xsvNLS-con1.1-(GS)6-E6AP.1
MYPYDVPDYAPKKKRKVQPKKKRKVQPKKKRKVGGGSGSSAVLQKKITDYFHPKKGSGSGSGSGSGSNPYLRLKVRRDHIIDDALVRLEMIAMENPADLKKQLYVEFEGEQGVDEGGVSKEFFQLVVEEIFNPDIGMFTYDESTKLFWFNPSSFETEGQFTLIGIVLGLAIYNNCILDVHFPMVVYRKLMGKKGTFRDLGDSHPVLYQSLKDLLEYEGNVEDDMMITFQISQTDLFGNPMMYDLKENGDKIPITNENRKEFVNLYSDYILNKSVEKQFKAFRRGFHMVTNESPLKYLFRPEEIELLICGSRNLDFQALEETTEYDGGYTRDSVLIREFWEIVHSFTDEQKRLFLQFTTGTDRAPVGGLGKLKMIIAKNGPDTERLPTSHTCFNVLLLPEYSSKEKLKERLLKAITYAKGFGML

SEQ ID NO: 3134 - protein, 424 aa, synthetic construct
  source 1..424: note = HA-3xsvNLS-FBXW7a.1-(GS)1-con1.1
MYPYDVPDYAPKKKRKVQPKKKRKVQPKKKRKVGGGSGSNQELLSVGSKRRRTGGSLRGNPSSSQVDEEQMNRVVEEEQQQQLRQQEEEHTARNGEVVGVEPRPGGQNDSQQGQLEENNNRFISVDEDSSGNQEEQEEDEEHAGEQDEEDEEEEEMDQESDDFDQSDDSSREDEHTHTNSVTNSSSIVDLPVHQLSSPFYTKTTKMKRKLDHGSEVRSFSLGKKPCKVSEYTSTTGLVPCSATPTTFGDLRAANGQGQQRRRITSVQPPTGLQEWLKMFQSWSGPEKLLALDELIDSCEPTQVKHMMQVIEPQFQRDFISLLPKELALYVLSFLEPKDLLQAAQTCRYWRILAEDNLLWREKCKEEGIDEPLHIKRRKVIKPGFIHSPWKSAYIRQHRIDTNSRRGGSSAVLQKKITDYFHPKK

SEQ ID NO: 3135 - protein, 426 aa, synthetic construct
  source 1..426: note = HA-3xsvNLS-FBXW7a.1-(GS)2-con1.1
MYPYDVPDYAPKKKRKVQPKKKRKVQPKKKRKVGGGSGSNQELLSVGSKRRRTGGSLRGNPSSSQVDEEQMNRVVEEEQQQQLRQQEEEHTARNGEVVGVEPRPGGQNDSQQGQLEENNNRFISVDEDSSGNQEEQEEDEEHAGEQDEEDEEEEEMDQESDDFDQSDDSSREDEHTHTNSVTNSSSIVDLPVHQLSSPFYTKTTKMKRKLDHGSEVRSFSLGKKPCKVSEYTSTTGLVPCSATPTTFGDLRAANGQGQQRRRITSVQPPTGLQEWLKMFQSWSGPEKLLALDELIDSCEPTQVKHMMQVIEPQFQRDFISLLPKELALYVLSFLEPKDLLQAAQTCRYWRILAEDNLLWREKCKEEGIDEPLHIKRRKVIKPGFIHSPWKSAYIRQHRIDTNSRRGGSGSSAVLQKKITDYFHPKK

SEQ ID NO: 3136 - protein, 428 aa, synthetic construct
  source 1..428: note = HA-3xsvNLS-FBXW7a.1-(GS)3-con1.1
MYPYDVPDYAPKKKRKVQPKKKRKVQPKKKRKVGGGSGSNQELLSVGSKRRRTGGSLRGNPSSSQVDEEQMNRVVEEEQQQQLRQQEEEHTARNGEVVGVEPRPGGQNDSQQGQLEENNNRFISVDEDSSGNQEEQEEDEEHAGEQDEEDEEEEEMDQESDDFDQSDDSSREDEHTHTNSVTNSSSIVDLPVHQLSSPFYTKTTKMKRKLDHGSEVRSFSLGKKPCKVSEYTSTTGLVPCSATPTTFGDLRAANGQGQQRRRITSVQPPTGLQEWLKMFQSWSGPEKLLALDELIDSCEPTQVKHMMQVIEPQFQRDFISLLPKELALYVLSFLEPKDLLQAAQTCRYWRILAEDNLLWREKCKEEGIDEPLHIKRRKVIKPGFIHSPWKSAYIRQHRIDTNSRRGGSGSGSSAVLQKKITDYFHPKK

SEQ ID NO: 3137 - protein, 430 aa, synthetic construct
  source 1..430: note = HA-3xsvNLS-FBXW7a.1-(GS)4-con1.1
MYPYDVPDYAPKKKRKVQPKKKRKVQPKKKRKVGGGSGSNQELLSVGSKRRRTGGSLRGNPSSSQVDEEQMNRVVEEEQQQQLRQQEEEHTARNGEVVGVEPRPGGQNDSQQGQLEENNNRFISVDEDSSGNQEEQEEDEEHAGEQDEEDEEEEEMDQESDDFDQSDDSSREDEHTHTNSVTNSSSIVDLPVHQLSSPFYTKTTKMKRKLDHGSEVRSFSLGKKPCKVSEYTSTTGLVPCSATPTTFGDLRAANGQGQQRRRITSVQPPTGLQEWLKMFQSWSGPEKLLALDELIDSCEPTQVKHMMQVIEPQFQRDFISLLPKELALYVLSFLEPKDLLQAAQTCRYWRILAEDNLLWREKCKEEGIDEPLHIKRRKVIKPGFIHSPWKSAYIRQHRIDTNSRRGGSGSGSGSSAVLQKKITDYFHPKK

SEQ ID NO: 3138 - protein, 432 aa, synthetic construct
  source 1..432: note = HA-3xsvNLS-FBXW7a.1-(GS)5-con1.1
MYPYDVPDYAPKKKRKVQPKKKRKVQPKKKRKVGGGSGSNQELLSVGSKRRRTGGSLRGNPSSSQVDEEQMNRVVEEEQQQQLRQQEEEHTARNGEVVGVEPRPGGQNDSQQGQLEENNNRFISVDEDSSGNQEEQEEDEEHAGEQDEEDEEEEEMDQESDDFDQSDDSSREDEHTHTNSVTNSSSIVDLPVHQLSSPFYTKTTKMKRKLDHGSEVRSFSLGKKPCKVSEYTSTTGLVPCSATPTTFGDLRAANGQGQQRRRITSVQPPTGLQEWLKMFQSWSGPEKLLALDELIDSCEPTQVKHMMQVIEPQFQRDFISLLPKELALYVLSFLEPKDLLQAAQTCRYWRILAEDNLLWREKCKEEGIDEPLHIKRRKVIKPGFIHSPWKSAYIRQHRIDTNSRRGGSGSGSGSGSSAVLQKKITDYFHPKK

SEQ ID NO: 3139 - protein, 434 aa, synthetic construct
  source 1..434: note = HA-3xsvNLS-FBXW7a.1-(GS)6-con1.1
MYPYDVPDYAPKKKRKVQPKKKRKVQPKKKRKVGGGSGSNQELLSVGSKRRRTGGSLRGNPSSSQVDEEQMNRVVEEEQQQQLRQQEEEHTARNGEVVGVEPRPGGQNDSQQGQLEENNNRFISVDEDSSGNQEEQEEDEEHAGEQDEEDEEEEEMDQESDDFDQSDDSSREDEHTHTNSVTNSSSIVDLPVHQLSSPFYTKTTKMKRKLDHGSEVRSFSLGKKPCKVSEYTSTTGLVPCSATPTTFGDLRAANGQGQQRRRITSVQPPTGLQEWLKMFQSWSGPEKLLALDELIDSCEPTQVKHMMQVIEPQFQRDFISLLPKELALYVLSFLEPKDLLQAAQTCRYWRILAEDNLLWREKCKEEGIDEPLHIKRRKVIKPGFIHSPWKSAYIRQHRIDTNSRRGGSGSGSGSGSGSSAVLQKKITDYFHPKK

SEQ ID NO: 3140 - protein, 378 aa, synthetic construct
  source 1..378: note = HA-3xsvNLS-KEAP1.1-(GS)1-con1.1
MYPYDVPDYAPKKKRKVQPKKKRKVQPKKKRKVGGGSGSQPDPRPSGAGACCRFLPLQSQCPEGAGDAVMYASTECKAEVTPSQHGNRTFSYTLEDHTKQAFGIMNELRLSQQLCDVTLQVKYQDAPAAQFMAHKVVLASSSPVFKAMFTNGLREQGMEVVSIEGIHPKVMERLIEFAYTASISMGEKCVLHVMNGAVMYQIDSVVRACSDFLVQQLDPSNAIGIANFAEQIGCVELHQRAREYIYMHFGEVAKQEEFFNLSHCQLVTLISRDDLNVRCESEVFHACINWVKYDCEQRRFYVQALLRAVRCHSLTPNFLQMQLQKCEILQSDSRCKDYLVKIFEELTLHKPTQVMPCRAPGSSAVLQKKITDYFHPKK

SEQ ID NO: 3141 - protein, 380 aa, synthetic construct
  source 1..380: note = HA-3xsvNLS-KEAP1.1-(GS)2-con1.1
MYPYDVPDYAPKKKRKVQPKKKRKVQPKKKRKVGGGSGSQPDPRPSGAGACCRFLPLQSQCPEGAGDAVMYASTECKAEVTPSQHGNRTFSYTLEDHTKQAFGIMNELRLSQQLCDVTLQVKYQDAPAAQFMAHKVVLASSSPVFKAMFTNGLREQGMEVVSIEGIHPKVMERLIEFAYTASISMGEKCVLHVMNGAVMYQIDSVVRACSDFLVQQLDPSNAIGIANFAEQIGCVELHQRAREYIYMHFGEVAKQEEFFNLSHCQLVTLISRDDLNVRCESEVFHACINWVKYDCEQRRFYVQALLRAVRCHSLTPNFLQMQLQKCEILQSDSRCKDYLVKIFEELTLHKPTQVMPCRAPGSGSSAVLQKKITDYFHPKK

SEQ ID NO: 3142 - protein, 382 aa, synthetic construct
  source 1..382: note = HA-3xsvNLS-KEAP1.1-(GS)3-con1.1
MYPYDVPDYAPKKKRKVQPKKKRKVQPKKKRKVGGGSGSQPDPRPSGAGACCRFLPLQSQCPEGAGDAVMYASTECKAEVTPSQHGNRTFSYTLEDHTKQAFGIMNELRLSQQLCDVTLQVKYQDAPAAQFMAHKVVLASSSPVFKAMFTNGLREQGMEVVSIEGIHPKVMERLIEFAYTASISMGEKCVLHVMNGAVMYQIDSVVRACSDFLVQQLDPSNAIGIANFAEQIGCVELHQRAREYIYMHFGEVAKQEEFFNLSHCQLVTLISRDDLNVRCESEVFHACINWVKYDCEQRRFYVQALLRAVRCHSLTPNFLQMQLQKCEILQSDSRCKDYLVKIFEELTLHKPTQVMPCRAPGSGSGSSAVLQKKITDYFHPKK

SEQ ID NO: 3143 - protein, 384 aa, synthetic construct
  source 1..384: note = HA-3xsvNLS-KEAP1.1-(GS)4-con1.1
MYPYDVPDYAPKKKRKVQPKKKRKVQPKKKRKVGGGSGSQPDPRPSGAGACCRFLPLQSQCPEGAGDAVMYASTECKAEVTPSQHGNRTFSYTLEDHTKQAFGIMNELRLSQQLCDVTLQVKYQDAPAAQFMAHKVVLASSSPVFKAMFTNGLREQGMEVVSIEGIHPKVMERLIEFAYTASISMGEKCVLHVMNGAVMYQIDSVVRACSDFLVQQLDPSNAIGIANFAEQIGCVELHQRAREYIYMHFGEVAKQEEFFNLSHCQLVTLISRDDLNVRCESEVFHACINWVKYDCEQRRFYVQALLRAVRCHSLTPNFLQMQLQKCEILQSDSRCKDYLVKIFEELTLHKPTQVMPCRAPGSGSGSGSSAVLQKKITDYFHPKK

SEQ ID NO: 3144 - protein, 386 aa, synthetic construct
  source 1..386: note = HA-3xsvNLS-KEAP1.1-(GS)5-con1.1
MYPYDVPDYAPKKKRKVQPKKKRKVQPKKKRKVGGGSGSQPDPRPSGAGACCRFLPLQSQCPEGAGDAVMYASTECKAEVTPSQHGNRTFSYTLEDHTKQAFGIMNELRLSQQLCDVTLQVKYQDAPAAQFMAHKVVLASSSPVFKAMFTNGLREQGMEVVSIEGIHPKVMERLIEFAYTASISMGEKCVLHVMNGAVMYQIDSVVRACSDFLVQQLDPSNAIGIANFAEQIGCVELHQRAREYIYMHFGEVAKQEEFFNLSHCQLVTLISRDDLNVRCESEVFHACINWVKYDCEQRRFYVQALLRAVRCHSLTPNFLQMQLQKCEILQSDSRCKDYLVKIFEELTLHKPTQVMPCRAPGSGSGSGSGSSAVLQKKITDYFHPKK

SEQ ID NO: 3145 - protein, 388 aa, synthetic construct
  source 1..388: note = HA-3xsvNLS-KEAP1.1-(GS)6-con1.1
MYPYDVPDYAPKKKRKVQPKKKRKVQPKKKRKVGGGSGSQPDPRPSGAGACCRFLPLQSQCPEGAGDAVMYASTECKAEVTPSQHGNRTFSYTLEDHTKQAFGIMNELRLSQQLCDVTLQVKYQDAPAAQFMAHKVVLASSSPVFKAMFTNGLREQGMEVVSIEGIHPKVMERLIEFAYTASISMGEKCVLHVMNGAVMYQIDSVVRACSDFLVQQLDPSNAIGIANFAEQIGCVELHQRAREYIYMHFGEVAKQEEFFNLSHCQLVTLISRDDLNVRCESEVFHACINWVKYDCEQRRFYVQALLRAVRCHSLTPNFLQMQLQKCEILQSDSRCKDYLVKIFEELTLHKPTQVMPCRAPGSGSGSGSGSGSSAVLQKKITDYFHPKK

SEQ ID NO: 3146 - protein, 153 aa, synthetic construct
  source 1..153: note = HA-3xsvNLS-RNF125.2-(GS)1-con1.1
MYPYDVPDYAPKKKRKVQPKKKRKVQPKKKRKVGGGSGSTSFDCAVCLEVLHQPVRTRCGHVFCRSCIATSLKNNKWTCPYCRAYLPSEGVPATDVAKRMKSEYKNCAECDTLVCLSEMRAHIRTCQKYIDKYGPGSSAVLQKKITDYFHPKK

SEQ ID NO: 3147 - protein, 155 aa, synthetic construct
  source 1..155: note = HA-3xsvNLS-RNF125.2-(GS)2-con1.1
MYPYDVPDYAPKKKRKVQPKKKRKVQPKKKRKVGGGSGSTSFDCAVCLEVLHQPVRTRCGHVFCRSCIATSLKNNKWTCPYCRAYLPSEGVPATDVAKRMKSEYKNCAECDTLVCLSEMRAHIRTCQKYIDKYGPGSGSSAVLQKKITDYFHPKK

SEQ ID NO: 3148 - protein, 157 aa, synthetic construct
  source 1..157: note = HA-3xsvNLS-RNF125.2-(GS)3-con1.1
MYPYDVPDYAPKKKRKVQPKKKRKVQPKKKRKVGGGSGSTSFDCAVCLEVLHQPVRTRCGHVFCRSCIATSLKNNKWTCPYCRAYLPSEGVPATDVAKRMKSEYKNCAECDTLVCLSEMRAHIRTCQKYIDKYGPGSGSGSSAVLQKKITDYFHPKK

SEQ ID NO: 3149 - protein, 159 aa, synthetic construct
  source 1..159: note = HA-3xsvNLS-RNF125.2-(GS)4-con1.1
MYPYDVPDYAPKKKRKVQPKKKRKVQPKKKRKVGGGSGSTSFDCAVCLEVLHQPVRTRCGHVFCRSCIATSLKNNKWTCPYCRAYLPSEGVPATDVAKRMKSEYKNCAECDTLVCLSEMRAHIRTCQKYIDKYGPGSGSGSGSSAVLQKKITDYFHPKK

SEQ ID NO: 3150 - protein, 161 aa, synthetic construct
  source 1..161: note = HA-3xsvNLS-RNF125.2-(GS)5-con1.1
MYPYDVPDYAPKKKRKVQPKKKRKVQPKKKRKVGGGSGSTSFDCAVCLEVLHQPVRTRCGHVFCRSCIATSLKNNKWTCPYCRAYLPSEGVPATDVAKRMKSEYKNCAECDTLVCLSEMRAHIRTCQKYIDKYGPGSGSGSGSGSSAVLQKKITDYFHPKK

SEQ ID NO: 3151 - protein, 163 aa, synthetic construct
  source 1..163: note = HA-3xsvNLS-RNF125.2-(GS)6-con1.1
MYPYDVPDYAPKKKRKVQPKKKRKVQPKKKRKVGGGSGSTSFDCAVCLEVLHQPVRTRCGHVFCRSCIATSLKNNKWTCPYCRAYLPSEGVPATDVAKRMKSEYKNCAECDTLVCLSEMRAHIRTCQKYIDKYGPGSGSGSGSGSGSSAVLQKKITDYFHPKK

SEQ ID NO: 3152 - protein, 99 aa, synthetic construct
  source 1..99: note = con1.1-(GS)1-VIF.1-3xsvNLS-HA
MSAVLQKKITDYFHPKKGSSESAIRNTILGRIVSPRCEYQAGHNKVGSLQYLALAALIKPKGGGSGSPKKKRKVQPKKKRKVQPKKKRKVYPYDVPDYA

SEQ ID NO: 3153 - protein, 101 aa, synthetic construct
  source 1..101: note = con1.1-(GS)2-VIF.1-3xsvNLS-HA
MSAVLQKKITDYFHPKKGSGSSESAIRNTILGRIVSPRCEYQAGHNKVGSLQYLALAALIKPKGGGSGSPKKKRKVQPKKKRKVQPKKKRKVYPYDVPDYA

SEQ ID NO: 3154 - protein, 103 aa, synthetic construct
  source 1..103: note = con1.1-(GS)3-VIF.1-3xsvNLS-HA
MSAVLQKKITDYFHPKKGSGSGSSESAIRNTILGRIVSPRCEYQAGHNKVGSLQYLALAALIKPKGGGSGSPKKKRKVQPKKKRKVQPKKKRKVYPYDVPDYA

SEQ ID NO: 3155 - protein, 105 aa, synthetic construct
  source 1..105: note = con1.1-(GS)4-VIF.1-3xsvNLS-HA
MSAVLQKKITDYFHPKKGSGSGSGSSESAIRNTILGRIVSPRCEYQAGHNKVGSLQYLALAALIKPKGGGSGSPKKKRKVQPKKKRKVQPKKKRKVYPYDVPDYA

SEQ ID NO: 3156 - protein, 107 aa, synthetic construct
  source 1..107: note = con1.1-(GS)5-VIF.1-3xsvNLS-HA
MSAVLQKKITDYFHPKKGSGSGSGSGSSESAIRNTILGRIVSPRCEYQAGHNKVGSLQYLALAALIKPKGGGSGSPKKKRKVQPKKKRKVQPKKKRKVYPYDVPDYA

SEQ ID NO: 3157 - protein, 109 aa, synthetic construct
  source 1..109: note = con1.1-(GS)6-VIF.1-3xsvNLS-HA
MSAVLQKKITDYFHPKKGSGSGSGSGSGSSESAIRNTILGRIVSPRCEYQAGHNKVGSLQYLALAALIKPKGGGSGSPKKKRKVQPKKKRKVQPKKKRKVYPYDVPDYA

SEQ ID NO: 3158 - protein, 269 aa, synthetic construct
  source 1..269: note = HA-p21.1-SPOP.2-3xsvNLS
MGYPYDVPDYAGSGSGSGRRQTSMTDFYHSTRSVNISGQNTMNMVKVPECRLADELGGLWENSRFTDCCLCVAGQEFQAHKAILAARSPVFSAMFEHEMEESKKNRVEINDVEPEVFKEMMCFIYTGKAPNLDKMADDLLAAADKYALERLKVMCEDALCSNLSVENAAEILILADLHSADQLKTQAVDFINYHASDVLETSGWKSMVVSHPHLVAEAYRSLASAQCPFLGPPRKRLKQSGGGSGSPKKKRKVQPKKKRKVQPKKKRKV

SEQ ID NO: 3159 - protein, 276 aa, synthetic construct
  source 1..276: note = HA-p21.2-SPOP.2-3xsvNLS
MGYPYDVPDYAGSGSGSGRGRRQTSMTDYFHSTRRLIFSSVNISGQNTMNMVKVPECRLADELGGLWENSRFTDCCLCVAGQEFQAHKAILAARSPVFSAMFEHEMEESKKNRVEINDVEPEVFKEMMCFIYTGKAPNLDKMADDLLAAADKYALERLKVMCEDALCSNLSVENAAEILILADLHSADQLKTQAVDFINYHASDVLETSGWKSMVVSHPHLVAEAYRSLASAQCPFLGPPRKRLKQSGGGSGSPKKKRKVQPKKKRKVQPKKKRKV

SEQ ID NO: 3160 - protein, 269 aa, synthetic construct
  source 1..269: note = HA-p21.3-SPOP.2-3xsvNLS
MGYPYDVPDYAGSGSGSGRRQTSMTDYFHSTRSVNISGQNTMNMVKVPECRLADELGGLWENSRFTDCCLCVAGQEFQAHKAILAARSPVFSAMFEHEMEESKKNRVEINDVEPEVFKEMMCFIYTGKAPNLDKMADDLLAAADKYALERLKVMCEDALCSNLSVENAAEILILADLHSADQLKTQAVDFINYHASDVLETSGWKSMVVSHPHLVAEAYRSLASAQCPFLGPPRKRLKQSGGGSGSPKKKRKVQPKKKRKVQPKKKRKV

SEQ ID NO: 3161 - protein, 269 aa, synthetic construct
  source 1..269: note = HA-p21.4-SPOP.2-3xsvNLS
MGYPYDVPDYAGSGSGSGRRQTSMTDYYHSTRSVNISGQNTMNMVKVPECRLADELGGLWENSRFTDCCLCVAGQEFQAHKAILAARSPVFSAMFEHEMEESKKNRVEINDVEPEVFKEMMCFIYTGKAPNLDKMADDLLAAADKYALERLKVMCEDALCSNLSVENAAEILILADLHSADQLKTQAVDFINYHASDVLETSGWKSMVVSHPHLVAEAYRSLASAQCPFLGPPRKRLKQSGGGSGSPKKKRKVQPKKKRKVQPKKKRKV

SEQ ID NO: 3162 - protein, 269 aa, synthetic construct
  source 1..269: note = HA-p21.5-SPOP.2-3xsvNLS
MGYPYDVPDYAGSGSGSGRRDSKITDHFHSTRSVNISGQNTMNMVKVPECRLADELGGLWENSRFTDCCLCVAGQEFQAHKAILAARSPVFSAMFEHEMEESKKNRVEINDVEPEVFKEMMCFIYTGKAPNLDKMADDLLAAADKYALERLKVMCEDALCSNLSVENAAEILILADLHSADQLKTQAVDFINYHASDVLETSGWKSMVVSHPHLVAEAYRSLASAQCPFLGPPRKRLKQSGGGSGSPKKKRKVQPKKKRKVQPKKKRKV

SEQ ID NO: 3163 - protein, 269 aa, synthetic construct
  source 1..269: note = HA-p21.6-SPOP.2-3xsvNLS
MGYPYDVPDYAGSGSGSGRRMKSIDTFFHSTRSVNISGQNTMNMVKVPECRLADELGGLWENSRFTDCCLCVAGQEFQAHKAILAARSPVFSAMFEHEMEESKKNRVEINDVEPEVFKEMMCFIYTGKAPNLDKMADDLLAAADKYALERLKVMCEDALCSNLSVENAAEILILADLHSADQLKTQAVDFINYHASDVLETSGWKSMVVSHPHLVAEAYRSLASAQCPFLGPPRKRLKQSGGGSGSPKKKRKVQPKKKRKVQPKKKRKV

SEQ ID NO: 3164 - protein, 269 aa, synthetic construct
  source 1..269: note = HA-p21.7-SPOP.2-3xsvNLS
MGYPYDVPDYAGSGSGSGRRQTRITEYFHSTRSVNISGQNTMNMVKVPECRLADELGGLWENSRFTDCCLCVAGQEFQAHKAILAARSPVFSAMFEHEMEESKKNRVEINDVEPEVFKEMMCFIYTGKAPNLDKMADDLLAAADKYALERLKVMCEDALCSNLSVENAAEILILADLHSADQLKTQAVDFINYHASDVLETSGWKSMVVSHPHLVAEAYRSLASAQCPFLGPPRKRLKQSGGGSGSPKKKRKVQPKKKRKVQPKKKRKV

SEQ ID NO: 3165 - protein, 269 aa, synthetic construct
  source 1..269: note = HA-p21.8-SPOP.2-3xsvNLS
MGYPYDVPDYAGSGSGSGRRQGRLDDFFHSTRSVNISGQNTMNMVKVPECRLADELGGLWENSRFTDCCLCVAGQEFQAHKAILAARSPVFSAMFEHEMEESKKNRVEINDVEPEVFKEMMCFIYTGKAPNLDKMADDLLAAADKYALERLKVMCEDALCSNLSVENAAEILILADLHSADQLKTQAVDFINYHASDVLETSGWKSMVVSHPHLVAEAYRSLASAQCPFLGPPRKRLKQSGGGSGSPKKKRKVQPKKKRKVQPKKKRKV

SEQ ID NO: 3166 - protein, 269 aa, synthetic construct
  source 1..269: note = HA-p21.9-SPOP.2-3xsvNLS
MGYPYDVPDYAGSGSGSGRRDTSMTDFYHSTRSVNISGQNTMNMVKVPECRLADELGGLWENSRFTDCCLCVAGQEFQAHKAILAARSPVFSAMFEHEMEESKKNRVEINDVEPEVFKEMMCFIYTGKAPNLDKMADDLLAAADKYALERLKVMCEDALCSNLSVENAAEILILADLHSADQLKTQAVDFINYHASDVLETSGWKSMVVSHPHLVAEAYRSLASAQCPFLGPPRKRLKQSGGGSGSPKKKRKVQPKKKRKVQPKKKRKV

SEQ ID NO: 3167 - protein, 136 aa, synthetic construct
  source 1..136: note = HA-mycNLS-NHLRC1.1-(GS)1-con1.1
MGYPYDVPDYAPAAKRVKLDGSGSGSESGPALHELMREAEISLLECKVCFEKFGHRQQRRPRNLSCGHVVCLACVAALAHPRTLALECPFCRRACRGCDTSDCLPVLHLIELLGSALRGSSAVLQKKITDYFHPKK

SEQ ID NO: 3168 - protein, 146 aa, synthetic construct
  source 1..146: note = HA-mycNLS-NHLRC1.1-(GS)6-con1.1
MGYPYDVPDYAPAAKRVKLDGSGSGSESGPALHELMREAEISLLECKVCFEKFGHRQQRRPRNLSCGHVVCLACVAALAHPRTLALECPFCRRACRGCDTSDCLPVLHLIELLGSALRGSGSGSGSGSGSSAVLQKKITDYFHPKK

SEQ ID NO: 3169 - protein, 136 aa, synthetic construct
  source 1..136: note = HA-mycNLS-con1.1-(GS)1-NHLRC1.1
MGYPYDVPDYAPAAKRVKLDGSGSGSSAVLQKKITDYFHPKKGSESGPALHELMREAEISLLECKVCFEKFGHRQQRRPRNLSCGHVVCLACVAALAHPRTLALECPFCRRACRGCDTSDCLPVLHLIELLGSALR

SEQ ID NO: 3170 - protein, 146 aa, synthetic construct
  source 1..146: note = HA-mycNLS-con1.1-(GS)6-NHLRC1.1
MGYPYDVPDYAPAAKRVKLDGSGSGSSAVLQKKITDYFHPKKGSGSGSGSGSGSESGPALHELMREAEISLLECKVCFEKFGHRQQRRPRNLSCGHVVCLACVAALAHPRTLALECPFCRRACRGCDTSDCLPVLHLIELLGSALR

SEQ ID NO: 3171 - protein, 222 aa, synthetic construct
  source 1..222: note = HA-mycNLS-con1.1-GGGS-CHIP.1
MGYPYDVPDYAPAAKRVKLDGGGSGSSAVLQKKITDYFHPKKGGGSRLNFGDDIPSALRIAKKKRWNSIEERRIHQESELHSYLSRLIAAERERELEECQRNHEGDEDDSHVRAQQACIEAKHDKYMADMDELFSQVDEKRKKRDIPDYLCGKISFELMREPCITPSGITYDRKDIEEHLQRVGHFDPVTRSPLTQEQLIPNLAMKEVIDAFISENGWVEDY

SEQ ID NO: 3172 - protein, 81 aa, synthetic construct
  source 1..81: note = HA-mycNLS-DCAF1.1-GGGS-con1.1
MGYPYDVPDYAPAAKRVKLDGGGSGSQAPINFTSRLNRRASFPKYGGVDGGCFDRHLIFSRGGGSSAVLQKKITDYFHPKK

SEQ ID NO: 3173 - protein, 402 aa, synthetic construct
  source 1..402: note = HA-mycNLS-con1.1-GGGS-E6AP.1
MGYPYDVPDYAPAAKRVKLDGGGSGSSAVLQKKITDYFHPKKGGGSNPYLRLKVRRDHIIDDALVRLEMIAMENPADLKKQLYVEFEGEQGVDEGGVSKEFFQLVVEEIFNPDIGMFTYDESTKLFWFNPSSFETEGQFTLIGIVLGLAIYNNCILDVHFPMVVYRKLMGKKGTFRDLGDSHPVLYQSLKDLLEYEGNVEDDMMITFQISQTDLFGNPMMYDLKENGDKIPITNENRKEFVNLYSDYILNKSVEKQFKAFRRGFHMVTNESPLKYLFRPEEIELLICGSRNLDFQALEETTEYDGGYTRDSVLIREFWEIVHSFTDEQKRLFLQFTTGTDRAPVGGLGKLKMIIAKNGPDTERLPTSHTCFNVLLLPEYSSKEKLKERLLKAITYAKGFGML

SEQ ID NO: 3174 - protein, 398 aa, synthetic construct
  source 1..398: note = HA-FBXW7a.1-GGGS-con1.1
MGYPYDVPDYANQELLSVGSKRRRTGGSLRGNPSSSQVDEEQMNRVVEEEQQQQLRQQEEEHTARNGEVVGVEPRPGGQNDSQQGQLEENNNRFISVDEDSSGNQEEQEEDEEHAGEQDEEDEEEEEMDQESDDFDQSDDSSREDEHTHTNSVTNSSSIVDLPVHQLSSPFYTKTTKMKRKLDHGSEVRSFSLGKKPCKVSEYTSTTGLVPCSATPTTFGDLRAANGQGQQRRRITSVQPPTGLQEWLKMFQSWSGPEKLLALDELIDSCEPTQVKHMMQVIEPQFQRDFISLLPKELALYVLSFLEPKDLLQAAQTCRYWRILAEDNLLWREKCKEEGIDEPLHIKRRKVIKPGFIHSPWKSAYIRQHRIDTNSRRGGGGSSAVLQKKITDYFHPKK

SEQ ID NO: 3175 - protein, 367 aa, synthetic construct
  source 1..367: note = HA-mycNLS-KEAP1.1-GGGS-con1.1
MGYPYDVPDYAPAAKRVKLDGGGSGSQPDPRPSGAGACCRFLPLQSQCPEGAGDAVMYASTECKAEVTPSQHGNRTFSYTLEDHTKQAFGIMNELRLSQQLCDVTLQVKYQDAPAAQFMAHKVVLASSSPVFKAMFTNGLREQGMEVVSIEGIHPKVMERLIEFAYTASISMGEKCVLHVMNGAVMYQIDSVVRACSDFLVQQLDPSNAIGIANFAEQIGCVELHQRAREYIYMHFGEVAKQEEFFNLSHCQLVTLISRDDLNVRCESEVFHACINWVKYDCEQRRFYVQALLRAVRCHSLTPNFLQMQLQKCEILQSDSRCKDYLVKIFEELTLHKPTQVMPCRAPGGGSSAVLQKKITDYFHPKK

SEQ ID NO: 3176 - protein, 88 aa, synthetic construct
  source 1..88: note = HA-mycNLS-con1.1-GGGS-VIF.1
MGYPYDVPDYAPAAKRVKLDGGGSGSSAVLQKKITDYFHPKKGGGSSESAIRNTILGRIVSPRCEYQAGHNKVGSLQYLALAALIKPK

SEQ ID NO: 3177 - protein, 142 aa, synthetic construct
  source 1..142: note = HA-mycNLS-RNF125.2-GGGS-con1.1
MGYPYDVPDYAPAAKRVKLDGGGSGSTSFDCAVCLEVLHQPVRTRCGHVFCRSCIATSLKNNKWTCPYCRAYLPSEGVPATDVAKRMKSEYKNCAECDTLVCLSEMRAHIRTCQKYIDKYGPGGGSSAVLQKKITDYFHPKK

SEQ ID NO: 3178 - protein, 138 aa, synthetic construct
  source 1..138: note = HA-mycNLS-con1.1-GGGS-NHLRC1.1
MGYPYDVPDYAPAAKRVKLDGGGSGSSAVLQKKITDYFHPKKGGGSESGPALHELMREAEISLLECKVCFEKFGHRQQRRPRNLSCGHVVCLACVAALAHPRTLALECPFCRRACRGCDTSDCLPVLHLIELLGSALR

SEQ ID NO: 3179 - protein, 125 aa, synthetic construct
  source 1..125: note = HA-mycNLS-con1.1-GGGS-CBLb.1
MGYPYDVPDYAPAAKRVKLDGGGSGSSAVLQKKITDYFHPKKGGGSPHDHIKVTQEQYELECEMGSTFQLCKICAENDKDVKIEPCGHLMCTSCLTAWQESDGQGCPFCRCEIKGTEPIIVDPFD

SEQ ID NO: 3180 - protein, 174 aa, synthetic construct
  source 1..174: note = HA-mycNLS-TRIM21.2-GGGS-con1.1
MGYPYDVPDYAPAAKRVKLDGGGSGSASAARLTMMWEEVTCPICLDPFVEPVSIECGHSFCQECISQVGKGGGSVCPVCRQRFLLKNLRPNRQLANMVNNLKEISQEAREGTQGERCAVHGERLHLFCEKDGKALCWVCAQSRKHRDHAMVPLEGGGSSAVLQKKITDYFHPKK

SEQ ID NO: 3181 - protein, 107 aa, synthetic construct
  source 1..107: note = HA-mycNLS-con1.1-GGGS-RNF4.1
MGYPYDVPDYAPAAKRVKLDGGGSGSSAVLQKKITDYFHPKKGGGSVSCPICMDGYSEIVQNGRLIVSTECGHVFCSQCLRDSLKNANTCPTCRKKINHKRYHPIYI

SEQ ID NO: 3182 - protein, 172 aa, synthetic construct
  source 1..172: note = HA-mycNLS-con1.1-GGGS-RNF25.1
MGYPYDVPDYAPAAKRVKLDGGGSGSSAVLQKKITDYFHPKKGGGSNIPHGQCVICLYGFQEKEAFTKTPCYHYFHCHCLARYIQHMEQELKAQGQEQEQERQHATTKQKAVGVQCPVCREPLVYDLASLKAAPEPQQPMELYQPSAESLRQQEERKRLYQRQQERGGIIDL

SEQ ID NO: 3183 - protein, 123 aa, synthetic construct
  source 1..123: note = HA-mycNLS-con1.1-GGGS-RNF6.2
MGYPYDVPDYAPAAKRVKLDGGGSGSSAVLQKKITDYFHPKKGGGSEQIDNLSTRHYEHNSIDSELGKICSVCISDYVTGNKLRQLPCMHEFHIHCIDRWLSENCTCPICRQPVLGSNIANNG

SEQ ID NO: 3184 - protein, 124 aa, synthetic construct
  source 1..124: note = HA-mycNLS-con1.1-GGGS-RNF12.2
MGYPYDVPDYAPAAKRVKLDGGGSGSSAVLQKKITDYFHPKKGGGSGLTKEQIDNLAMRSFGENDALKTCSVCITEYTEGNKLRKLPCSHEYHVHCIDRWLSENSTCPICRRAVLASGNRESVV

SEQ ID NO: 3185 - protein, 141 aa, synthetic construct
  source 1..141: note = HA-mycNLS-RNF114.1-GGGS3-con1.1
MGYPYDVPDYAPAAKRVKLDGGGSGSGRFTCPVCLEVYEKPVQVPCGHVFCSACLQECLKPKKPVCGVCRSALAPGVRAVELERQIESTETSCHGCRKNFFLSKIRSHVATCSKYQNYIMEGGGSSAVLQKKITDYFHPKK

SEQ ID NO: 3186 - protein, 146 aa, synthetic construct
  source 1..146: note = HA-mycNLS-RNF138.1-GGGS-con1.1
MGYPYDVPDYAPAAKRVKLDGGGSGSDDFYCPVCQEVLKTPVRTTACQHVFCRKCFLTAMRESGAHCPLCRGNVTRRERACPERALDLENIMRKFSGSCRCCAKQIKFYRMRHHYKSCKKYQDEYGGGGSSAVLQKKITDYFHPKK

SEQ ID NO: 3187 - protein, 147 aa, synthetic construct
  source 1..147: note = HA-mycNLS-RNF166.1-GGGS-con1.1
MGYPYDVPDYAPAAKRVKLDGGGSGSGLEAQYTCPICLEVYHRPVAIGSCGHTFCGECLQPCLQVPSPLCPLCRLPFDPKKVDKATHVEKQLSSYKAPCRGCNKKVTLAKMRVHISSCLKVQEQMANGGGSSAVLQKKITDYFHPKK

SEQ ID NO: 3188 - protein, 141 aa, synthetic construct
  source 1..141: note = HA-mycNLS-RNF125.2-GGGS-p21.1
MGYPYDVPDYAPAAKRVKLDGGGSGSTSFDCAVCLEVLHQPVRTRCGHVFCRSCIATSLKNNKWTCPYCRAYLPSEGVPATDVAKRMKSEYKNCAECDTLVCLSEMRAHIRTCQKYIDKYGPGGGSGRRQTSMTDFYHSTR

SEQ ID NO: 3189 - protein, 148 aa, synthetic construct
  source 1..148: note = HA-mycNLS-RNF125.2-GGGS-p21.2
MGYPYDVPDYAPAAKRVKLDGGGSGSTSFDCAVCLEVLHQPVRTRCGHVFCRSCIATSLKNNKWTCPYCRAYLPSEGVPATDVAKRMKSEYKNCAECDTLVCLSEMRAHIRTCQKYIDKYGPGGGSGRGRRQTSMTDYFHSTRRLIFS

SEQ ID NO: 3190 - protein, 141 aa, synthetic construct
  source 1..141: note = HA-mycNLS-RNF125.2-GGGS-p21.3
MGYPYDVPDYAPAAKRVKLDGGGSGSTSFDCAVCLEVLHQPVRTRCGHVFCRSCIATSLKNNKWTCPYCRAYLPSEGVPATDVAKRMKSEYKNCAECDTLVCLSEMRAHIRTCQKYIDKYGPGGGSGRRQTSMTDYFHSTR

SEQ ID NO: 3191 - protein, 141 aa, synthetic construct
  source 1..141: note = HA-mycNLS-RNF125.2-GGGS-p21.4
MGYPYDVPDYAPAAKRVKLDGGGSGSTSFDCAVCLEVLHQPVRTRCGHVFCRSCIATSLKNNKWTCPYCRAYLPSEGVPATDVAKRMKSEYKNCAECDTLVCLSEMRAHIRTCQKYIDKYGPGGGSGRRQTSMTDYYHSTR

SEQ ID NO: 3192 - protein, 141 aa, synthetic construct
  source 1..141: note = HA-mycNLS-RNF125.2-GGGS-p21.5
MGYPYDVPDYAPAAKRVKLDGGGSGSTSFDCAVCLEVLHQPVRTRCGHVFCRSCIATSLKNNKWTCPYCRAYLPSEGVPATDVAKRMKSEYKNCAECDTLVCLSEMRAHIRTCQKYIDKYGPGGGSGRRDSKITDHFHSTR

SEQ ID NO: 3193 - protein, 141 aa, synthetic construct
  source 1..141: note = HA-mycNLS-RNF125.2-GGGS-p21.6
MGYPYDVPDYAPAAKRVKLDGGGSGSTSFDCAVCLEVLHQPVRTRCGHVFCRSCIATSLKNNKWTCPYCRAYLPSEGVPATDVAKRMKSEYKNCAECDTLVCLSEMRAHIRTCQKYIDKYGPGGGSGRRMKSIDTFFHSTR

SEQ ID NO: 3194 - protein, 141 aa, synthetic construct
  source 1..141: note = HA-mycNLS-RNF125.2-GGGS-p21.7
MGYPYDVPDYAPAAKRVKLDGGGSGSTSFDCAVCLEVLHQPVRTRCGHVFCRSCIATSLKNNKWTCPYCRAYLPSEGVPATDVAKRMKSEYKNCAECDTLVCLSEMRAHIRTCQKYIDKYGPGGGSGRRQTRITEYFHSTR

SEQ ID NO: 3195 - protein, 141 aa, synthetic construct
  source 1..141: note = HA-mycNLS-RNF125.2-GGGS-p21.8
MGYPYDVPDYAPAAKRVKLDGGGSGSTSFDCAVCLEVLHQPVRTRCGHVFCRSCIATSLKNNKWTCPYCRAYLPSEGVPATDVAKRMKSEYKNCAECDTLVCLSEMRAHIRTCQKYIDKYGPGGGSGRRQGRLDDFFHSTR

SEQ ID NO: 3196 - protein, 141 aa, synthetic construct
  source 1..141: note = HA-mycNLS-RNF125.2-GGGS-p21.9
MGYPYDVPDYAPAAKRVKLDGGGSGSTSFDCAVCLEVLHQPVRTRCGHVFCRSCIATSLKNNKWTCPYCRAYLPSEGVPATDVAKRMKSEYKNCAECDTLVCLSEMRAHIRTCQKYIDKYGPGGGSGRRDTSMTDFYHSTR

SEQ ID NO: 3197 - protein, 106 aa, synthetic construct
  source 1..106: note = HA-mycNLS-p21.1-GGGS-RNF4.1
MGYPYDVPDYAPAAKRVKLDGGGSGSGRRQTSMTDFYHSTRGGGSVSCPICMDGYSEIVQNGRLIVSTECGHVFCSQCLRDSLKNANTCPTCRKKINHKRYHPIYI

SEQ ID NO: 3198 - protein, 113 aa, synthetic construct
  source 1..113: note = HA-mycNLS-p21.2-GGGS-RNF4.1
MGYPYDVPDYAPAAKRVKLDGGGSGSGRGRRQTSMTDYFHSTRRLIFSGGGSVSCPICMDGYSEIVQNGRLIVSTECGHVFCSQCLRDSLKNANTCPTCRKKINHKRYHPIYI

SEQ ID NO: 3199 - protein, 106 aa, synthetic construct
  source 1..106: note = HA-mycNLS-p21.3-GGGS-RNF4.1
MGYPYDVPDYAPAAKRVKLDGGGSGSGRRQTSMTDYFHSTRGGGSVSCPICMDGYSEIVQNGRLIVSTECGHVFCSQCLRDSLKNANTCPTCRKKINHKRYHPIYI

SEQ ID NO: 3200 - protein, 106 aa, synthetic construct
  source 1..106: note = HA-mycNLS-p21.4-GGGS-RNF4.1
MGYPYDVPDYAPAAKRVKLDGGGSGSGRRQTSMTDYYHSTRGGGSVSCPICMDGYSEIVQNGRLIVSTECGHVFCSQCLRDSLKNANTCPTCRKKINHKRYHPIYI

SEQ ID NO: 3201 - protein, 106 aa, synthetic construct
  source 1..106: note = HA-mycNLS-p21.5-GGGS-RNF4.1
MGYPYDVPDYAPAAKRVKLDGGGSGSGRRDSKITDHFHSTRGGGSVSCPICMDGYSEIVQNGRLIVSTECGHVFCSQCLRDSLKNANTCPTCRKKINHKRYHPIYI

SEQ ID NO: 3202 - protein, 106 aa, synthetic construct
  source 1..106: note = HA-mycNLS-p21.6-GGGS-RNF4.1
MGYPYDVPDYAPAAKRVKLDGGGSGSGRRMKSIDTFFHSTRGGGSVSCPICMDGYSEIVQNGRLIVSTECGHVFCSQCLRDSLKNANTCPTCRKKINHKRYHPIYI

SEQ ID NO: 3203 - protein, 106 aa, synthetic construct
  source 1..106: note = HA-mycNLS-p21.7-GGGS-RNF4.1
MGYPYDVPDYAPAAKRVKLDGGGSGSGRRQTRITEYFHSTRGGGSVSCPICMDGYSEIVQNGRLIVSTECGHVFCSQCLRDSLKNANTCPTCRKKINHKRYHPIYI

SEQ ID NO: 3204 - protein, 106 aa, synthetic construct
  source 1..106: note = HA-mycNLS-p21.8-GGGS-RNF4.1
MGYPYDVPDYAPAAKRVKLDGGGSGSGRRQGRLDDFFHSTRGGGSVSCPICMDGYSEIVQNGRLIVSTECGHVFCSQCLRDSLKNANTCPTCRKKINHKRYHPIYI

SEQ ID NO: 3205 - protein, 106 aa, synthetic construct
  source 1..106: note = HA-mycNLS-p21.9-GGGS-RNF4.1
MGYPYDVPDYAPAAKRVKLDGGGSGSGRRDTSMTDFYHSTRGGGSVSCPICMDGYSEIVQNGRLIVSTECGHVFCSQCLRDSLKNANTCPTCRKKINHKRYHPIYI

SEQ ID NO: 3206 - protein, 240 aa, synthetic construct
  source 1..240: note = SPOP.2-con1.1-HA
MSVNISGQNTMNMVKVPECRLADELGGLWENSRFTDCCLCVAGQEFQAHKAILAARSPVFSAMFEHEMEESKKNRVEINDVEPEVFKEMMCFIYTGKAPNLDKMADDLLAAADKYALERLKVMCEDALCSNLSVENAAEILILADLHSADQLKTQAVDFINYHASDVLETSGWKSMVVSHPHLVAEAYRSLASAQCPFLGPPRKRLKQSSAVLQKKITDYFHPKKGSGSGSYPYDVPDYA

SEQ ID NO: 3207 - RNA, 507 nt, synthetic construct
  source 1..507: mol_type = other RNA; note = HA-mycNLS-TCF4.6-(GS)6-NHLRC1.1
atggggtacccatacgacgtaccagactacgcaccggccgcaaagcgagtgaaactggacggaagcgggagcggcagcgacgacctgggagcgaacgacgaactcataagcttcagggacgagggggaacaggaagaggccgaaagagacctggccgacgtgaagagcagcctggtaaacgaaagcgaaacaggcagcggaagcggcagcggcagcgggagcggcagcgagagcggaccagcactgcacgaactgatgagggaagcggagataagcctgctggagtgcaaagtatgcttcgagaagttcggacacaggcaacaacgaaggccgagaaacctgagctgcggacacgtagtatgcctggcctgcgtagcagcactcgcacacccccggaccctggcactggaatgcccattctgccggcgagcatgccggggatgcgacacaagcgactgcctgccagtactgcacctcatagaactgctcggaagcgcactgcggtga

SEQ ID NO: 3208 - RNA, 471 nt, synthetic construct
  source 1..471: mol_type = other RNA; note = HA-mycNLS-TCF4.6-NHLRC1.1
atggggtacccatacgacgtaccagactacgcaccggccgcaaagcgagtgaaactggacggaagcgggagcggcagcgacgacctgggagcgaacgacgaactcataagcttcagggacgagggggaacaggaagaggccgaaagagacctggccgacgtgaagagcagcctggtaaacgaaagcgaaacagagagcggaccagcactgcacgaactgatgagggaagcggagataagcctgctggagtgcaaagtatgcttcgagaagttcggacacaggcaacaacgaaggccgagaaacctgagctgcggacacgtagtatgcctggcctgcgtagcagcactcgcacacccccggaccctggcactggaatgcccattctgccggcgagcatgccggggatgcgacacaagcgactgcctgccagtactgcacctcatagaactgctcggaagcgcactgcggtga

SEQ ID NO: 3209 - RNA, 495 nt, synthetic construct
  source 1..495: mol_type = other RNA; note = HA-mycNLS-TCF4.12-(GS)6-NHLRC1.1
atggggtacccatacgacgtaccagactacgcaccggccgcaaagcgagtgaaactggacggaagcgggagcggcagcgacgacctgggagcgaacgacgaactcataagcttcaaggacgagggggaacaggaagaggccgaaagagacctggccgacgtgaagagcagcctggtaaacggcagcggaagcggcagcggcagcgggagcggcagcgagagcggaccagcactgcacgaactgatgagggaagcggagataagcctgctggagtgcaaagtatgcttcgagaagttcggacacaggcaacaacgaaggccgagaaacctgagctgcggacacgtagtatgcctggcctgcgtagcagcactcgcacacccccggaccctggcactggaatgcccattctgccggcgagcatgccggggatgcgacacaagcgactgcctgccagtactgcacctcatagaactgctcggaagcgcactgcggtga

SEQ ID NO: 3210 - RNA, 495 nt, synthetic construct
  source 1..495: mol_type = other RNA; note = HA-mycNLS-TCF4.16-(GS)6-NHLRC1.1
atggggtacccatacgacgtaccagactacgcaccggccgcaaagcgagtgaaactggacggaagcgggagcggcagcgacgacctgggagcgaacgacgaactcataagcttcagggacgagggggaacaggaagaggccgaaagagacctggccgacgtgaagagcagcctggtaaacggcagcggaagcggcagcggcagcgggagcggcagcgagagcggaccagcactgcacgaactgatgagggaagcggagataagcctgctggagtgcaaagtatgcttcgagaagttcggacacaggcaacaacgaaggccgagaaacctgagctgcggacacgtagtatgcctggcctgcgtagcagcactcgcacacccccggaccctggcactggaatgcccattctgccggcgagcatgccggggatgcgacacaagcgactgcctgccagtactgcacctcatagaactgctcggaagcgcactgcggtga

SEQ ID NO: 3211 - RNA, 510 nt, synthetic construct
  source 1..510: mol_type = other RNA; note = HA-TCF4.6-(GS)6-NHLRC1.1-spNLS.2
atggggtacccatacgacgtaccagactacgcaggaagcgggagcggcagcgacgacctgggagcgaacgacgaactcataagcttcagggacgagggggaacaggaagaggccgaaagagacctggccgacgtgaagagcagcctggtaaacgaaagcgaaacaggcagcggaagcggcagcggcagcgggagcggcagcgagagcggaccagcactgcacgaactgatgagggaagcggagataagcctgctggagtgcaaagtatgcttcgagaagttcggacacaggcaacaacgaaggccgagaaacctgagctgcggacacgtagtatgcctggcctgcgtagcagcactcgcacacccccggaccctggcactggaatgcccattctgccggcgagcatgccggggatgcgacacaagcgactgcctgccagtactgcacctcatagaactgctcggaagcgcactgcggggaccaccgaggaagagactcaagcaaagctga

SEQ ID NO: 3212 - RNA, 474 nt, synthetic construct
  source 1..474: mol_type = other RNA; note = HA-TCF4.6-NHLRC1.1-spNLS.2
atggggtacccatacgacgtaccagactacgcaggaagcgggagcggcagcgacgacctgggagcgaacgacgaactcataagcttcagggacgagggggaacaggaagaggccgaaagagacctggccgacgtgaagagcagcctggtaaacgaaagcgaaacagagagcggaccagcactgcacgaactgatgagggaagcggagataagcctgctggagtgcaaagtatgcttcgagaagttcggacacaggcaacaacgaaggccgagaaacctgagctgcggacacgtagtatgcctggcctgcgtagcagcactcgcacacccccggaccctggcactggaatgcccattctgccggcgagcatgccggggatgcgacacaagcgactgcctgccagtactgcacctcatagaactgctcggaagcgcactgcggggaccaccgaggaagagactcaagcaaagctga

SEQ ID NO: 3213 - RNA, 498 nt, synthetic construct
  source 1..498: mol_type = other RNA; note = HA-TCF4.12-(GS)6-NHLRC1.1-spNLS.2
atggggtacccatacgacgtaccagactacgcaggaagcgggagcggcagcgacgacctgggagcgaacgacgaactcataagcttcaaggacgagggggaacaggaagaggccgaaagagacctggccgacgtgaagagcagcctggtaaacggcagcggaagcggcagcggcagcgggagcggcagcgagagcggaccagcactgcacgaactgatgagggaagcggagataagcctgctggagtgcaaagtatgcttcgagaagttcggacacaggcaacaacgaaggccgagaaacctgagctgcggacacgtagtatgcctggcctgcgtagcagcactcgcacacccccggaccctggcactggaatgcccattctgccggcgagcatgccggggatgcgacacaagcgactgcctgccagtactgcacctcatagaactgctcggaagcgcactgcggggaccaccgaggaagagactcaagcaaagctga

SEQ ID NO: 3214 - RNA, 498 nt, synthetic construct
  source 1..498: mol_type = other RNA; note = HA-TCF4.16-(GS)6-NHLRC1.1-spNLS.2
atggggtacccatacgacgtaccagactacgcaggaagcgggagcggcagcgacgacctgggagcgaacgacgaactcataagcttcagggacgagggggaacaggaagaggccgaaagagacctggccgacgtgaagagcagcctggtaaacggcagcggaagcggcagcggcagcgggagcggcagcgagagcggaccagcactgcacgaactgatgagggaagcggagataagcctgctggagtgcaaagtatgcttcgagaagttcggacacaggcaacaacgaaggccgagaaacctgagctgcggacacgtagtatgcctggcctgcgtagcagcactcgcacacccccggaccctggcactggaatgcccattctgccggcgagcatgccggggatgcgacacaagcgactgcctgccagtactgcacctcatagaactgctcggaagcgcactgcggggaccaccgaggaagagactcaagcaaagctga

SEQ ID NO: 3215 - RNA, 480 nt, synthetic construct
  source 1..480: mol_type = other RNA; note = mycNLS-TCF4.6-(GS)6-NHLRC1.1
atggggccggccgcaaagcgagtgaaactggacggaagcgggagcggcagcgacgacctgggagcgaacgacgaactcataagcttcagggacgagggggaacaggaagaggccgaaagagacctggccgacgtgaagagcagcctggtaaacgaaagcgaaacaggcagcggaagcggcagcggcagcgggagcggcagcgagagcggaccagcactgcacgaactgatgagggaagcggagataagcctgctggagtgcaaagtatgcttcgagaagttcggacacaggcaacaacgaaggccgagaaacctgagctgcggacacgtagtatgcctggcctgcgtagcagcactcgcacacccccggaccctggcactggaatgcccattctgccggcgagcatgccggggatgcgacacaagcgactgcctgccagtactgcacctcatagaactgctcggaagcgcactgcggtga

SEQ ID NO: 3216 - RNA, 444 nt, synthetic construct
  source 1..444: mol_type = other RNA; note = mycNLS-TCF4.6-NHLRC1.1
atggggccggccgcaaagcgagtgaaactggacggaagcgggagcggcagcgacgacctgggagcgaacgacgaactcataagcttcagggacgagggggaacaggaagaggccgaaagagacctggccgacgtgaagagcagcctggtaaacgaaagcgaaacagagagcggaccagcactgcacgaactgatgagggaagcggagataagcctgctggagtgcaaagtatgcttcgagaagttcggacacaggcaacaacgaaggccgagaaacctgagctgcggacacgtagtatgcctggcctgcgtagcagcactcgcacacccccggaccctggcactggaatgcccattctgccggcgagcatgccggggatgcgacacaagcgactgcctgccagtactgcacctcatagaactgctcggaagcgcactgcggtga

SEQ ID NO: 3217 - RNA, 468 nt, synthetic construct
  source 1..468: mol_type = other RNA; note = mycNLS-TCF4.12-(GS)6-NHLRC1.1
atggggccggccgcaaagcgagtgaaactggacggaagcgggagcggcagcgacgacctgggagcgaacgacgaactcataagcttcaaggacgagggggaacaggaagaggccgaaagagacctggccgacgtgaagagcagcctggtaaacggcagcggaagcggcagcggcagcgggagcggcagcgagagcggaccagcactgcacgaactgatgagggaagcggagataagcctgctggagtgcaaagtatgcttcgagaagttcggacacaggcaacaacgaaggccgagaaacctgagctgcggacacgtagtatgcctggcctgcgtagcagcactcgcacacccccggaccctggcactggaatgcccattctgccggcgagcatgccggggatgcgacacaagcgactgcctgccagtactgcacctcatagaactgctcggaagcgcactgcggtga

SEQ ID NO: 3218 - RNA, 468 nt, synthetic construct
  source 1..468: mol_type = other RNA; note = mycNLS-TCF4.16-(GS)6-NHLRC1.1
atggggccggccgcaaagcgagtgaaactggacggaagcgggagcggcagcgacgacctgggagcgaacgacgaactcataagcttcagggacgagggggaacaggaagaggccgaaagagacctggccgacgtgaagagcagcctggtaaacggcagcggaagcggcagcggcagcgggagcggcagcgagagcggaccagcactgcacgaactgatgagggaagcggagataagcctgctggagtgcaaagtatgcttcgagaagttcggacacaggcaacaacgaaggccgagaaacctgagctgcggacacgtagtatgcctggcctgcgtagcagcactcgcacacccccggaccctggcactggaatgcccattctgccggcgagcatgccggggatgcgacacaagcgactgcctgccagtactgcacctcatagaactgctcggaagcgcactgcggtga

SEQ ID NO: 3219 - RNA, 465 nt, synthetic construct
  source 1..465: mol_type = other RNA; note = TCF4.6-(GS)6-NHLRC1.1-spNLS.2
atgggggacgacctgggagcgaacgacgaactcataagcttcagggacgagggggaacaggaagaggccgaaagagacctggccgacgtgaagagcagcctggtaaacgaaagcgaaacaggcagcggaagcggcagcggcagcgggagcggcagcgagagcggaccagcactgcacgaactgatgagggaagcggagataagcctgctggagtgcaaagtatgcttcgagaagttcggacacaggcaacaacgaaggccgagaaacctgagctgcggacacgtagtatgcctggcctgcgtagcagcactcgcacacccccggaccctggcactggaatgcccattctgccggcgagcatgccggggatgcgacacaagcgactgcctgccagtactgcacctcatagaactgctcggaagcgcactgcggggaccaccgaggaagagactcaagcaaagctga

SEQ ID NO: 3220 - RNA, 429 nt, synthetic construct
  source 1..429: mol_type = other RNA; note = TCF4.6-NHLRC1.1-spNLS.2
atgggggacgacctgggagcgaacgacgaactcataagcttcagggacgagggggaacaggaagaggccgaaagagacctggccgacgtgaagagcagcctggtaaacgaaagcgaaacagagagcggaccagcactgcacgaactgatgagggaagcggagataagcctgctggagtgcaaagtatgcttcgagaagttcggacacaggcaacaacgaaggccgagaaacctgagctgcggacacgtagtatgcctggcctgcgtagcagcactcgcacacccccggaccctggcactggaatgcccattctgccggcgagcatgccggggatgcgacacaagcgactgcctgccagtactgcacctcatagaactgctcggaagcgcactgcggggaccaccgaggaagagactcaagcaaagctga

SEQ ID NO: 3221 - RNA, 453 nt, synthetic construct
  source 1..453: mol_type = other RNA; note = TCF4.12-(GS)6-NHLRC1.1-spNLS.2
atgggggacgacctgggagcgaacgacgaactcataagcttcaaggacgagggggaacaggaagaggccgaaagagacctggccgacgtgaagagcagcctggtaaacggcagcggaagcggcagcggcagcgggagcggcagcgagagcggaccagcactgcacgaactgatgagggaagcggagataagcctgctggagtgcaaagtatgcttcgagaagttcggacacaggcaacaacgaaggccgagaaacctgagctgcggacacgtagtatgcctggcctgcgtagcagcactcgcacacccccggaccctggcactggaatgcccattctgccggcgagcatgccggggatgcgacacaagcgactgcctgccagtactgcacctcatagaactgctcggaagcgcactgcggggaccaccgaggaagagactcaagcaaagctga

SEQ ID NO: 3222 - RNA, 453 nt, synthetic construct
  source 1..453: mol_type = other RNA; note = TCF4.16-(GS)6-NHLRC1.1-spNLS.2
atgggggacgacctgggagcgaacgacgaactcataagcttcagggacgagggggaacaggaagaggccgaaagagacctggccgacgtgaagagcagcctggtaaacggcagcggaagcggcagcggcagcgggagcggcagcgagagcggaccagcactgcacgaactgatgagggaagcggagataagcctgctggagtgcaaagtatgcttcgagaagttcggacacaggcaacaacgaaggccgagaaacctgagctgcggacacgtagtatgcctggcctgcgtagcagcactcgcacacccccggaccctggcactggaatgcccattctgccggcgagcatgccggggatgcgacacaagcgactgcctgccagtactgcacctcatagaactgctcggaagcgcactgcggggaccaccgaggaagagactcaagcaaagctga

SEQ ID NO: 3223 - RNA, 324 nt, synthetic construct
  source 1..324: mol_type = other RNA; note = HA-mycNLS-DCAF1.1-(GS)1-TCF4.1
atgtacccatacgacgtacccgactacgcaccagccgcaaaacgggtgaaactcgacggaagcggaagcggaagccaagcaccaatcaacttcacaagcagactgaaccgacgcgccagcttcccaaaatacggcggggtggacggcgggtgcttcgacagacacctgatattcagccgcggaagcgacgacctgggagcaaacgacgaactcataagcttcaaagacgaaggagaacaagaagagaaaagcagcgaaaacagcagcgcagaaagagacctggcagacgtaaagagcagcctggtaaacgaaagcgaaacatga

SEQ ID NO: 3224 - RNA, 612 nt, synthetic construct
  source 1..612: mol_type = other RNA; note = HA-mycNLS-RNF125.1-(GS)3-TCF4.1
atgtacccatacgacgtaccagactacgcaccagcagcaaaaagagtaaaactcgacggaagcggaagcggaagcggaagcgtactgagcacagacagcggaaaaagcgcaccagcaagcgcgaccgcaagagcactggaaagaagaagagacccagaactgccagtaacaagcttcgactgcgcagtatgcctggaagtactgcaccaaccagtaagaacaagatgcggacacgtattctgcagaagctgcatagcaacaagcctgaaaaacaacaaatggacatgcccatactgcagagcatacctgccaagcgaaggagtaccagcaacggacgtagccaaaagaatgaaaagcgaatacaaaaactgcgcggaatgcgacacgctggtatgcctgagcgaaatgagagcacacataaggacatgccagaagtacatagacaaatacggaccaggaagcggaagcggaagcgacgacctgggagcaaacgacgagctgatcagcttcaaagacgaaggagaacaggaagagaaaagcagcgaaaacagcagcgcagaaagagacctcgcggacgtaaaaagcagcctggtaaacgaaagcgaaacctga

SEQ ID NO: 3225 - RNA, 534 nt, synthetic construct
  source 1..534: mol_type = other RNA; note = RNF166.1-(GS)3-TCF4.1-mycNLS-HA
atgggactggaagcgcagtacacatgcccaatatgcctggaggtataccaccgaccggtagcaataggcagctgcgggcacacattctgcggagagtgcctgcaaccatgcctgcaagtaccaagcccgctctgcccgctgtgcagactgcccttcgacccaaagaaagtagacaaggcaacacacgtagaaaaacaactgagcagctacaaggcaccgtgcagaggatgcaacaaaaaagtaacactggcgaagatgcgagtacacataagcagctgcctgaaagtacaggaacaaatggccaacgggagcggcagcggaagcgacgacctgggcgccaacgacgagctgataagcttcaaagacgagggagaacaagaggagaagagcagcgagaacagcagcgcggaacgcgacctggcggacgtgaaaagcagcctggtaaacgaaagcgagacaggcagcgggagcgggagcccagcagcaaaacgagtaaaactggactacccatacgacgtgccggactacgcatga

SEQ ID NO: 3226 - RNA, 495 nt, synthetic construct
  source 1..495: mol_type = other RNA; note = HA-mycNLS-TCF4.1-(GS)1-NHLRC1.1
atgtacccatacgacgtaccagactacgcaccggccgcaaagcgagtgaaactggacggaagcgggagcggcagcgacgacctgggagcgaacgacgaactcataagcttcaaggacgagggggaacaggaagagaaaagcagcgaaaacagcagcgccgaaagagacctggccgacgtgaagagcagcctggtaaacgaaagcgaaacaggcagcgagagcggaccagcactgcacgaactgatgagggaagcggagataagcctgctggagtgcaaagtatgcttcgagaagttcggacacaggcaacaacgaaggccgagaaacctgagctgcggacacgtagtatgcctggcctgcgtagcagcactcgcacacccccggaccctggcactggaatgcccattctgccggcgagcatgccggggatgcgacacaagcgactgcctgccagtactgcacctcatagaactgctcggaagcgcactgcggtga

SEQ ID NO: 3227 - RNA, 525 nt, synthetic construct
  source 1..525: mol_type = other RNA; note = HA-mycNLS-TCF4.1-(GS)6-NHLRC1.1
atgtacccatacgacgtaccagactacgcaccggccgcaaagcgagtgaaactggacggaagcgggagcggcagcgacgacctgggagcgaacgacgaactcataagcttcaaggacgagggggaacaggaagagaaaagcagcgaaaacagcagcgccgaaagagacctggccgacgtgaagagcagcctggtaaacgaaagcgaaacaggcagcggcagcggcagcggcagcggcagcggcagcgagagcggaccagcactgcacgaactgatgagggaagcggagataagcctgctggagtgcaaagtatgcttcgagaagttcggacacaggcaacaacgaaggccgagaaacctgagctgcggacacgtagtatgcctggcctgcgtagcagcactcgcacacccccggaccctggcactggaatgcccattctgccggcgagcatgccggggatgcgacacaagcgactgcctgccagtactgcacctcatagaactgctcggaagcgcactgcggtga

SEQ ID NO: 3228 - RNA, 474 nt, synthetic construct
  source 1..474: mol_type = other RNA; note = HA-mycNLS-TCF4.2-(GS)1-NHLRC1.1
atgtacccatacgacgtaccagactacgcaccggccgcaaagcgagtgaaactggacggaagcgggagcggcagcgacgacctgggagcgaacgacgaactcataagcttcaaggacgagggggaacaggaagaggccgaaagagacctggccgacgtgaagagcagcctggtaaacgaaagcgaaacaggcagcgagagcggaccagcactgcacgaactgatgagggaagcggagataagcctgctggagtgcaaagtatgcttcgagaagttcggacacaggcaacaacgaaggccgagaaacctgagctgcggacacgtagtatgcctggcctgcgtagcagcactcgcacacccccggaccctggcactggaatgcccattctgccggcgagcatgccggggatgcgacacaagcgactgcctgccagtactgcacctcatagaactgctcggaagcgcactgcggtga

SEQ ID NO: 3229 - RNA, 474 nt, synthetic construct
  source 1..474: mol_type = other RNA; note = HA-mycNLS-TCF4.6-(GS)1-NHLRC1.1
atgtacccatacgacgtaccagactacgcaccggccgcaaagcgagtgaaactggacggaagcgggagcggcagcgacgacctgggagcgaacgacgaactcataagcttccgagacgagggggaacaggaagaggccgaaagagacctggccgacgtgaagagcagcctggtaaacgaaagcgaaacaggcagcgagagcggaccagcactgcacgaactgatgagggaagcggagataagcctgctggagtgcaaagtatgcttcgagaagttcggacacaggcaacaacgaaggccgagaaacctgagctgcggacacgtagtatgcctggcctgcgtagcagcactcgcacacccccggaccctggcactggaatgcccattctgccggcgagcatgccggggatgcgacacaagcgactgcctgccagtactgcacctcatagaactgctcggaagcgcactgcggtga

SEQ ID NO: 3230 - RNA, 507 nt, synthetic construct
  source 1..507: mol_type = other RNA; note = HA-mycNLS-TCF4.2-(GS)6-NHLRC1.1
atggggtacccatacgacgtaccagactacgcaccggccgcaaagcgagtgaaactggacggaagcgggagcggcagcgacgacctgggagcgaacgacgaactcataagcttcaaggacgagggggaacaggaagaggccgaaagagacctggccgacgtgaagagcagcctggtaaacgaaagcgaaacaggcagcggaagcggcagcggcagcgggagcggcagcgagagcggaccagcactgcacgaactgatgagggaagcggagataagcctgctggagtgcaaagtatgcttcgagaagttcggacacaggcaacaacgaaggccgagaaacctgagctgcggacacgtagtatgcctggcctgcgtagcagcactcgcacacccccggaccctggcactggaatgcccattctgccggcgagcatgccggggatgcgacacaagcgactgcctgccagtactgcacctcatagaactgctcggaagcgcactgcggtga

SEQ ID NO: 3231 - RNA, 1647 nt, synthetic construct
  source 1..1647: mol_type = other RNA; note = 3x(HA-mycNLS-TCF4.2-(GS)6-NHLRC1.1-P2A)
atggggtacccatacgacgtaccagactacgcaccggccgcaaagcgagtgaaactggacggaagcgggagcggcagcgacgacctgggagcgaacgacgaactcataagcttcaaggacgagggggaacaggaagaggccgaaagagacctggccgacgtgaagagcagcctggtaaacgaaagcgaaacaggcagcggaagcggcagcggcagcgggagcggcagcgagagcggaccagcactgcacgaactgatgagggaagcggagataagcctgctggagtgcaaagtatgcttcgagaagttcggacacaggcaacaacgaaggccgagaaacctgagctgcggacacgtagtatgcctggcctgcgtagcagcactcgcacacccccggaccctggcactggaatgcccattctgccggcgagcatgccggggatgcgacacaagcgactgcctgccagtactgcacctcatagaactgctcggaagcgcactgcggggaagcggagctactaacttcagcctgctgaagcaggctggagacgtggaggagaaccctggacctatggggtacccatacgacgtaccagactacgcaccggccgcaaagcgagtgaaactggacggaagcgggagcggcagcgacgacctgggagcgaacgacgaactcataagcttcaaggacgagggggaacaggaagaggccgaaagagacctggccgacgtgaagagcagcctggtaaacgaaagcgaaacaggcagcggaagcggcagcggcagcgggagcggcagcgagagcggaccagcactgcacgaactgatgagggaagcggagataagcctgctggagtgcaaagtatgcttcgagaagttcggacacaggcaacaacgaaggccgagaaacctgagctgcggacacgtagtatgcctggcctgcgtagcagcactcgcacacccccggaccctggcactggaatgcccattctgccggcgagcatgccggggatgcgacacaagcgactgcctgccagtactgcacctcatagaactgctcggaagcgcactgcggggatccggagccacgaacttctctctgttaaagcaagcaggagacgtggaagaaaaccccggtcctatggggtacccatacgacgtaccagactacgcaccggccgcaaagcgagtgaaactggacggaagcgggagcggcagcgacgacctgggagcgaacgacgaactcataagcttcaaggacgagggggaacaggaagaggccgaaagagacctggccgacgtgaagagcagcctggtaaacgaaagcgaaacaggcagcggaagcggcagcggcagcgggagcggcagcgagagcggaccagcactgcacgaactgatgagggaagcggagataagcctgctggagtgcaaagtatgcttcgagaagttcggacacaggcaacaacgaaggccgagaaacctgagctgcggacacgtagtatgcctggcctgcgtagcagcactcgcacacccccggaccctggcactggaatgcccattctgccggcgagcatgccggggatgcgacacaagcgactgcctgccagtactgcacctcatagaactgctcggaagcgcactgcggtga

SEQ ID NO: 3232 - RNA, 1641 nt, synthetic construct
  source 1..1641: mol_type = other RNA; note = 3x(HA-mycNLS-TCF4.2-(GS)6-NHLRC1.1-T2A)
atggggtacccatacgacgtaccagactacgcaccggccgcaaagcgagtgaaactggacggaagcgggagcggcagcgacgacctgggagcgaacgacgaactcataagcttcaaggacgagggggaacaggaagaggccgaaagagacctggccgacgtgaagagcagcctggtaaacgaaagcgaaacaggcagcggaagcggcagcggcagcgggagcggcagcgagagcggaccagcactgcacgaactgatgagggaagcggagataagcctgctggagtgcaaagtatgcttcgagaagttcggacacaggcaacaacgaaggccgagaaacctgagctgcggacacgtagtatgcctggcctgcgtagcagcactcgcacacccccggaccctggcactggaatgcccattctgccggcgagcatgccggggatgcgacacaagcgactgcctgccagtactgcacctcatagaactgctcggaagcgcactgcggggaagcggagagggcagaggaagtctgctaacatgcggtgacgtcgaggagaatcctggacctatggggtacccatacgacgtaccagactacgcaccggccgcaaagcgagtgaaactggacggaagcgggagcggcagcgacgacctgggagcgaacgacgaactcataagcttcaaggacgagggggaacaggaagaggccgaaagagacctggccgacgtgaagagcagcctggtaaacgaaagcgaaacaggcagcggaagcggcagcggcagcgggagcggcagcgagagcggaccagcactgcacgaactgatgagggaagcggagataagcctgctggagtgcaaagtatgcttcgagaagttcggacacaggcaacaacgaaggccgagaaacctgagctgcggacacgtagtatgcctggcctgcgtagcagcactcgcacacccccggaccctggcactggaatgcccattctgccggcgagcatgccggggatgcgacacaagcgactgcctgccagtactgcacctcatagaactgctcggaagcgcactgcggggatccggagagggacgcggatcactgcttacttgcggggatgtggaggagaatcccggtcccatggggtacccatacgacgtaccagactacgcaccggccgcaaagcgagtgaaactggacggaagcgggagcggcagcgacgacctgggagcgaacgacgaactcataagcttcaaggacgagggggaacaggaagaggccgaaagagacctggccgacgtgaagagcagcctggtaaacgaaagcgaaacaggcagcggaagcggcagcggcagcgggagcggcagcgagagcggaccagcactgcacgaactgatgagggaagcggagataagcctgctggagtgcaaagtatgcttcgagaagttcggacacaggcaacaacgaaggccgagaaacctgagctgcggacacgtagtatgcctggcctgcgtagcagcactcgcacacccccggaccctggcactggaatgcccattctgccggcgagcatgccggggatgcgacacaagcgactgcctgccagtactgcacctcatagaactgctcggaagcgcactgcggtga

SEQ ID NO: 3233 - RNA, 762 nt, synthetic construct
  source 1..762: mol_type = other RNA; note = HA-nlpNLS-mycV.1500-d-NHLRC1.1
atgggttacccatacgacgtgccagactacgcagccgtcaagagaccagcagcaacaaaaaaagcaggacaagcgaaaaagaaaaaactcgacggaggaggcagcggaagcgaagtacagctcctggaaagcggagggggactcgtacaaccaggaggaagcctgagactgagcgcagcagcaagcggattcacattcgcagacacagacatgggatggttcagacaagcaccagggaaggaaagagaaggagtgagcgcaatcagcggaagcgggggaagcacatactacgcagacagcgtcaaaggaagattcacaataagccgagacaacagcaaaaacacactgtacctccaaatgaacagcctgagggcagaagacacagcagtctactacgtagccataatcgacgacatactcacgggaggaacattcgacgaaggagactactggggaagaggaacacaggtaacagtcagcagcgagagcggaccagcactgcacgaactgatgagggaagcggagataagcctgctggagtgcaaagtatgcttcgagaagttcggacacaggcaacaacgaaggccgagaaacctgagctgcggacacgtagtatgcctggcctgcgtagcagcactcgcacacccccggaccctggcactggaatgcccattctgccggcgagcatgccggggatgcgacacaagcgactgcctgccagtactgcacctcatagaactgctcggaagcgcactgcggtga

SEQ ID NO: 3234 - RNA, 681 nt, synthetic construct
  source 1..681: mol_type = other RNA; note = HA-nlpNLS-mycV.1500-(GS)2-RNF4.1
atgggttacccatacgacgtgccagactacgcagccgtcaagagaccagcagcaacaaaaaaagcaggacaagcgaaaaagaaaaaactcgacggaggaggcagcggaagcgaagtacagctcctggaaagcggagggggactcgtacaaccaggaggaagcctgagactgagcgcagcagcaagcggattcacattcgcagacacagacatgggatggttcagacaagcaccagggaaggaaagagaaggagtgagcgcaatcagcggaagcgggggaagcacatactacgcagacagcgtcaaaggaagattcacaataagccgagacaacagcaaaaacacactgtacctccaaatgaacagcctgagggcagaagacacagcagtctactacgtagccataatcgacgacatactcacgggaggaacattcgacgaaggagactactggggaagaggaacacaggtaacagtcagcagcggaagcggaagcgtcagctgcccgatatgcatggacggatacagcgaaatagtacaaaacggaaggctcatagtgagcacagaatgcgggcacgtcttctgcagccaatgcctgagagacagcctgaaaaacgcaaacacatgcccaacatgcagaaagaaaataaaccacaaaagataccacccaatatacatatga

SEQ ID NO: 3235 - RNA, 819 nt, synthetic construct
  source 1..819: mol_type = other RNA; note = HA-RNF125.2-(GS)2-mycV.1500-hrpNLS
atgggttacccatacgacgtgccagactacgcaggaggaggcagcggaagcacgagcttcgactgcgcagtctgcctggaagtcctccaccagcccgtaagaacacggtgcggccacgtcttctgcagaagctgcatagcaacaagcctgaaaaacaacaaatggacctgcccgtactgccgagcctacctgccaagcgaaggagtaccagccaccgacgtagcgaaacgaatgaaaagcgaatacaaaaactgcgcagagtgcgacacactggtatgcctgagcgaaatgagagcgcacatcaggacgtgccaaaaatacatagacaaatacgggccaggcagcggaagcgaagtacagctcctggaaagcggagggggactcgtacaaccaggaggaagcctgagactgagcgcagcagcaagcggattcacattcgcagacacagacatgggatggttcagacaagcaccagggaaggaaagagaaggagtgagcgcaatcagcggaagcgggggaagcacatactacgcagacagcgtcaaaggaagattcacaataagccgagacaacagcaaaaacacactgtacctccaaatgaacagcctgagggcagaagacacagcagtctactacgtagccataatcgacgacatactcacgggaggaacattcgacgaaggagactactggggaagaggaacacaggtaacagtcagcagcggcggaggcagccggagcggaggaaaccaccggcggaacggacgcgggggaagagggggatacaaccggagaaacaacggctaccacccatactga

SEQ ID NO: 3236 - protein, 240 aa, synthetic construct
  source 1..240: note = HA-con1.1-SPOP.2
MYPYDVPDYAGSGSGSSAVLQKKITDYFHPKKSVNISGQNTMNMVKVPECRLADELGGLWENSRFTDCCLCVAGQEFQAHKAILAARSPVFSAMFEHEMEESKKNRVEINDVEPEVFKEMMCFIYTGKAPNLDKMADDLLAAADKYALERLKVMCEDALCSNLSVENAAEILILADLHSADQLKTQAVDFINYHASDVLETSGWKSMVVSHPHLVAEAYRSLASAQCPFLGPPRKRLKQS

SEQ ID NO: 3237 - protein, 226 aa, synthetic construct; identical to SEQ ID NO: 3108
  source 1..226: note = HA-con1.1-SPOP.3

SEQ ID NO: 3238 - protein, 272 aa, synthetic construct
  source 1..272: note = HA-RNF125.2-(GS)2-mycV.1500-hrpNLS
MGYPYDVPDYAGGGSGSTSFDCAVCLEVLHQPVRTRCGHVFCRSCIATSLKNNKWTCPYCRAYLPSEGVPATDVAKRMKSEYKNCAECDTLVCLSEMRAHIRTCQKYIDKYGPGSGSEVQLLESGGGLVQPGGSLRLSAAASGFTFADTDMGWFRQAPGKEREGVSAISGSGGSTYYADSVKGRFTISRDNSKNTLYLQMNSLRAEDTAVYYVAIIDDILTGGTFDEGDYWGRGTQVTVSSGGGSRSGGNHRRNGRGGRGGYNRRNNGYHPY

SEQ ID NO: 3239 - protein, 261 aa, Homo sapiens
  source 1..261: note = Human PCNA Uniprot ID: P12004
MFEARLVQGSILKKVLEALKDLINEACWDISSSGVNLQSMDSSHVSLVQLTLRSEGFDTYRCDRNLAMGVNLTSMSKILKCAGNEDIITLRAEDNADTLALVFEAPNQEKVSDYEMKLMDLDVEQLGIPEQEYSCVVKMPSGEFARICRDLSHIGDAVVISCAKDGVKFSASGELGNGNIKLSQTSNVDKEEEAVTIEMNEPVQLTFALRYLNFFTKATPLSSTVTLSMSADVPLVVEYKIADMGHLKYYLAPKIEDEEGS

SEQ ID NO: 3240 - protein, 190 aa, Homo sapiens
  source 1..190: note = RNF4 human full length Uniprot P78317
MSTRKRRGGAINSRQAQKRTREATSTPEISLEAEPIELVETAGDEIVDLTCESLEPVVVDLTHNDSVVIVDERRRPRRNARRLPQDHADSCVVSSDDEELSRDRDVYVTTHTPRNARDEGATGLRPSGTVSCPICMDGYSEIVQNGRLIVSTECGHVFCSQCLRDSLKNANTCPTCRKKINHKRYHPIYI

SEQ ID NO: 3241 - protein, 685 aa, Homo sapiens [sequence omitted]

SEQ ID NO: 3242 - protein, 154 aa, Homo sapiens
  source 1..154: note = RNF11 human full length Uniprot Q9Y3C5
MGNCLKSPTSDDISLLHESQSDRASFGEGTEPDQEPPPPYQEQVPVPVYHPTPSQTRLATQLTEEEQIRIAQRIGLIQHLPKGVYDPGRDGSEKKIRECVICMMDFVYGDPIRFLPCMHIYHLDCIDDWLMRSFTCPSCMEPVDAALLSSYETN

SEQ ID NO: 3243 - protein, 624 aa, Homo sapiens
  source 1..624: note = RNF12 human full length Uniprot Q9NVW2
MENSDSNDKGSGDQSAAQRRSQMDRLDREEAFYQFVNNLSEEDYRLMRDNNLLGTPGESTEEELLRRLQQIKEGPPPQNSDENRGGDSSDDVSNGDSIIDWLNSVRQTGNTTRSGQRGNQSWRAVSRTNPNSGDFRFSLEINVNRNNGSQNSENENEPSARRSSGENVENNSQRQVENPRSESTSARPSRSERNSTEALTEVPPTRGQRRARSRSPDHRRTRARAERSRSPLHPMSEIPRRSHHSISSQTFEHPLVNETEGSSRTRHHVTLRQQISGPELLSRGLFAASGTRNASQGAGSSDTAASGESTGSGQRPPTIVLDLQVRRVRPGEYRQRDSIASRTRSRSQTPNNTVTYESERGGFRRTFSRSERAGVRTYVSTIRIPIRRILNTGLSETTSVAIQTMLRQIMTGFGELSYFMYSDSDSEPTGSVSNRNMERAESRSGRGGSGGGSSSGSSSSSSSSSSSSSSSSSSSSPSSSSGGESSETSSDLFEGSNEGSSSSGSSGARREGRHRAPVTFDESGSLPFLSLAQFFLLNEDDDDQPRGLTKEQIDNLAMRSFGENDALKTCSVCITEYTEGNKLRKLPCSHEYHVHCIDRWLSENSTCPICRRAVLASGNRESVV

SEQ ID NO: 3244 - protein, 975 aa, Homo sapiens
  source 1..975: note = RNF20 human full length Uniprot Q5VTR2
MSGIGNKRAAGEPGTSMPPEKKAAVEDSGTTVETIKLGGVSSTEELDIRTLQTKNRKLAEMLDQRQAIEDELREHIEKLERRQATDDASLLIVNRYWSQFDENIRIILKRYDLEQGLGDLLTERKALVVPEPEPDSDSNQERKDDRERGEGQEPAFSFLATLASSSSEEMESQLQERVESSRRAVSQIVTVYDKLQEKVELLSRKLNSGDNLIVEEAVQELNSFLAQENMRLQELTDLLQEKHRTMSQEFSKLQSKVETAESRVSVLESMIDDLQWDIDKIRKREQRLNRHLAEVLERVNSKGYKVYGAGSSLYGGTITINARKFEEMNAELEENKELAQNRLCELEKLRQDFEEVTTQNEKLKVELRSAVEQVVKETPEYRCMQSQFSVLYNESLQLKAHLDEARTLLHGTRGTHQHQVELIERDEVSLHKKLRTEVIQLEDTLAQVRKEYEMLRIEFEQTLAANEQAGPINREMRHLISSLQNHNHQLKGEVLRYKRKLREAQSDLNKTRLRSGSALLQSQSSTEDPKDEPAELKPDSEDLSSQSSASKASQEDANEIKSKRDEEERERERREKEREREREREKEKEREREKQKLKESEKERDSAKDKEKGKHDDGRKKEAEIIKQLKIELKKAQESQKEMKLLLDMYRSAPKEQRDKVQLMAAEKKSKAELEDLRQRLKDLEDKEKKENKKMADEDALRKIRAVEEQIEYLQKKLAMAKQEEEALLSEMDVTGQAFEDMQEQNIRLMQQLREKDDANFKLMSERIKSNQIHKLLKEEKEELADQVLTLKTQVDAQLQVVRKLEEKEHLLQSNIGTGEKELGLRTQALEMNKRKAMEAAQLADDLKAQLELAQKKLHDFQDEIVENSVTKEKDMFNFKRAQEDISRLRRKLETTKKPDNVPKCDEILMEEIKDYKARLTCPCCNMRKKDAVLTKCFHVFCFECVKTRYDTRQRKCPKCNAAFGANDFHRIYIG

SEQ ID NO: 3245 - protein, 459 aa, Homo sapiens
  source 1..459: note = RNF25 human full length Uniprot Q96BH1
MAASASAAAGEEDWVLPSEVEVLESIYLDELQVIKGNGRTSPWEIYITLHPATAEDQDSQYVCFTLVLQVPAEYPHEVPQISIRNPRGLSDEQIHTILQVLGHVAKAGLGTAMLYELIEKGKEILTDNNIPHGQCVICLYGFQEKEAFTKTPCYHYFHCHCLARYIQHMEQELKAQGQEQEQERQHATTKQKAVGVQCPVCREPLVYDLASLKAAPEPQQPMELYQPSAESLRQQEERKRLYQRQQERGGIIDLEAERNRYFISLQQPPAPAEPESAVDVSKGSQPPSTLAAELSTSPAVQSTLPPPLPVATQHICEKIPGTRSNQQRLGETQKAMLDPPKPSRGPWRQPERRHPKGGECHAPKGTRDTQELPPPEGPLKEPMDLKPEPHSQGVEGPPQEKGPGSWQGPPPRRTRDCVRWERSKGRTPGSSYPRLPRGQGAYRPGTRRESLGLESKDGS

SEQ ID NO: 3246 - protein, 994 aa, Homo sapiens
  source 1..994: note = RNF111 human full length Uniprot Q6ZNA4
MSQWTPEYNELYTLKVDMKSEIPSDAPKTQESLKGILLHPEPIGAAKSFPAGVEMINSKVGNEFSHLCDDSQKQEKEMNGNQQEQEKSLVVRKKRKSQQAGPSYVQNCVKENQGILGLRQHLGTPSDEDNDSSFSDCLSSPSSSLHFGDSDTVTSDEDKEVSVRHSQTILNAKSRSHSARSHKWPRTETESVSGLLMKRPCLHGSSLRRLPCRKRFVKNNSSQRTQKQKERILMQRKKREVLARRKYALLPSSSSSSENDLSSESSSSSSTEGEEDLFVSASENHQNNPAVPSGSIDEDVVVIEASSTPQVTANEEINVTSTDSEVEIVTVGESYRSRSTLGHSRSHWSQGSSSHASRPQEPRNRSRISTVIQPLRQNAAEVVDLTVDEDEPTVVPTTSARMESQATSASINNSNPSTSEQASDTASAVTSSQPSTVSETSATLTSNSTTGTSIGDDSRRTTSSAVTETGPPAMPRLPSCCPQHSPCGGSSQNHHALGHPHTSCFQQHGHHFQHHHHHHHTPHPAVPVSPSFSDPACPVERPPQVQAPCGANSSSGTSYHEQQALPVDLSNSGIRSHGSGSFHGASAFDPCCPVSSSRAAIFGHQAAAAAPSQPLSSIDGYGSSMVAQPQPQPPPQPSLSSCRHYMPPPYASLTRPLHHQASACPHSHGNPPPQTQPPPQVDYVIPHPVHAFHSQISSHATSHPVAPPPPTHLASTAAPIPQHLPPTHQPISHHIPATAPPAQRLHPHEVMQRMEVQRRRMMQHPTRAHERPPPHPHRMHPNYGHGHHIHVPQTMSSHPRQAPERSAWELGIEAGVTAATYTPGALHPHLAHYHAPPRLHHLQLGALPLMVPDMAGYPHIRYISSGLDGTSFRGPFRGNFEELIHLEERLGNVNRGASQGTIERCTYPHKYKKVTTDWFSQRKLHCKQDGEEGTEEDTEEKCTICLSILEEGEDVRRLPCMHLFHQVCVDQWLITNKKCPICRVDIEAQLPSES

SEQ ID NO: 3247 - protein, 304 aa, Homo sapiens
  source 1..304: note = RNF115 human full length Uniprot Q9Y4L5
MAEASAAGADSGAAVAAHRFFCHFCKGEVSPKLPEYICPRCESGFIEEVTDDSSFLGGGGSRIDNTTTTHFAELWGHLDHTMFFQDFRPFLSSSPLDQDNRANERGHQTHTDFWGARPPRLPLGRRYRSRGSSRPDRSPAIEGILQHIFAGFFANSAIPGSPHPFSWSGMLHSNPGDYAWGQTGLDAIVTQLLGQLENTGPPPADKEKITSLPTVTVTQEQVDMGLECPVCKEDYTVEEEVRQLPCNHFFHSSCIVPWLELHDTCPVCRKSLNGEDSTRQSQSTEASASNRFSNDSQLHDRWTF

SEQ ID NO: 3248 - protein, 428 aa, Homo sapiens
  source 1..428: note = RNF128 human full length Uniprot Q8TEB7
MGPPPGAGVSCRGGCGFSRLLAWCFLLALSPQAPGSRGAEAVWTAYLNVSWRVPHTGVNRTVWELSEEGVYGQDSPLEPVAGVLVPPDGPGALNACNPHTNFTVPTVWGSTVQVSWLALIQRGGGCTFADKIHLAYERGASGAVIFNFPGTRNEVIPMSHPGAVDIVAIMIGNLKGTKILQSIQRGIQVTMVIEVGKKHGPWVNHYSIFFVSVSFFIITAATVGYFIFYSARRLRNARAQSRKQRQLKADAKKAIGRLQLRTLKQGDKEIGPDGDSCAVCIELYKPNDLVRILTCNHIFHKTCVDPWLLEHRTCPMCKCDILKALGIEVDVEDGSVSLQVPVSNEISNSASSHEEDNRSETASSGYASVQGTDEPPLEEHVQSTNESLQLVNHEANSVAVDVIPHVDNPTFEEDETPNQETAVREIKS

SEQ ID NO: 3249 - protein, 400 aa, Homo sapiens
  source 1..400: note = RNF149 human full length Uniprot Q8NC42
MAWRRREASVGARGVLALALLALALCVPGARGRALEWFSAVVNIEYVDPQTNLTVWSVSESGRFGDSSPKEGAHGLVGVPWAPGGDLEGCAPDTRFFVPEPGGRGAAPWVALVARGGCTFKDKVLVAARRNASAVVLYNEERYGNITLPMSHAGTGNIVVIMISYPKGREILELVQKGIPVTMTIGVGTRHVQEFISGQSVVFVAIAFITMMIISLAWLIFYYIQRFLYTGSQIGSQSHRKETKKVIGQLLLHTVKHGEKGIDVDAENCAVCIENFKVKDIIRILPCKHIFHRICIDPWLLDHRTCPMCKLDVIKALGYWGEPGDVQEMPAPESPPGRDPAANLSLALPDDDGSDDSSPPSASPAESEPQCDPSFKGDAGENTALLEAGRSDSRHGGPIS

SEQ ID NO: 3250 - protein, 203 aa, Homo sapiens
  source 1..203: note = RNF152 human full length Uniprot Q8N8N0
METLSQDSLLECQICFNYYSPRRRPKLLDCKHTCCSVCLQQMRTSQKDVRCPWCRGVTKLPPGFSVSQLPDDPEVLAVIAIPHTSEHTPVFIKLPSNGCYMLPLPISKERALLPGDMGCRLLPGSQQKSVTVVTIPAEQQPLQGGAPQEAVEEEQDRRGVVKSSTWSGVCTVILVACVLVFLLGIVLHNMSCISKRFTVISCG

SEQ ID NO: 3251 - protein, 346 aa, Homo sapiens
  source 1..346: note = RNF165 human full length Uniprot Q6ZSG1
MVLVHVGYLVLPVFGSVRNRGAPFQRSQHPHATSCRHFHLGPPQPQQLAPDFPLAHPVQSQPGLSAHMAPAHQHSGALHQSLTPLPTLQFQDVTGPSFLPQALHQQYLLQQQLLEAQHRRLVSHPRRSQERVSVHPHRLHPSFDFGQLQTPQPRYLAEGTDWDLSVDAGLSPAQFQVRPIPQHYQHYLATPRMHHFPRNSSSTQMVVHEIRNYPYPQLHFLALQGLNPSRHTSAVRESYEELLQLEDRLGNVTRGAVQNTIERFTFPHKYKKRRPQDGKGKKDEGEESDTDEKCTICLSMLEDGEDVRRLPCMHLFHQLCVDQWLAMSKKCPICRVDIETQLGADS

SEQ ID NO: 3252 - protein, 247 aa, Homo sapiens
  source 1..247: note = RNF182 human full length Uniprot Q8N6D2
MASQPPEDTAESQASDELECKICYNRYNLKQRKPKVLECCHRVCAKCLYKIIDFGDSPQGVIVCPFCRFETCLPDDEVSSLPDDNNILVNLTCGGKGKKCLPENPTELLLTPKRLASLVSPSHTSSNCLVITIMEVQRESSPSLSSTPVVEFYRPASFDSVTTVSHNWTVWNCTSLLFQTSIRVLVWLLGLLYFSSLPLGIYLLVSKKVTLGVVFVSLVPSSLVILMVYGFCQCVCHEFLDCMAPPS

SEQ ID NO: 3253 - protein, 653 aa, Homo sapiens
  source 1..653: note = TRIM32 human full length Uniprot Q13049
MAAAAASHLNLDALREVLECPICMESFTEEQLRPKLLHCGHTICRQCLEKLLASSINGVRCPFCSKITRITSLTQLTDNLTVLKIIDTAGLSEAVGLLMCRSCGRRLPRQFCRSCGLVLCEPCREADHQPPGHCTLPVKEAAEERRRDFGEKLTRLRELMGELQRRKAALEGVSKDLQARYKAVLQEYGHEERRVQDELARSRKFFTGSLAEVEKSNSQVVEEQSYLLNIAEVQAVSRCDYFLAKIKQADVALLEETADEEEPELTASLPRELTLQDVELLKVGHVGPLQIGQAVKKPRTVNVEDSWAMEATASAASTSVTFREMDMSPEEVVASPRASPAKQRGPEAASNIQQCLFLKKMGAKGSTPGMFNLPVSLYVTSQGEVLVADRGNYRIQVFTRKGFLKEIRRSPSGIDSFVLSFLGADLPNLTPLSVAMNCQGLIGVTDSYDNSLKVYTLDGHCVACHRSQLSKPWGITALPSGQFVVTDVEGGKLWCFTVDRGSGVVKYSCLCSAVRPKFVTCDAEGTVYFTQGLGLNLENRQNEHHLEGGFSIGSVGPDGQLGRQISHFFSENEDFRCIAGMCVDARGDLIVADSSRKEILHFPKGGGYSVLIREGLTCPVGIALTPKGQLLVLDCWDHCIKIYSYHLRRYSTP

SEQ ID NO: 3254 - protein, 192 aa, Human immunodeficiency virus type 1
  source 1..192: note = VIF human full length Uniprot P12504
MENRWQVMIVWQVDRMRINTWKRLVKHHMYISRKAKDWFYRHHYESTNPKISSEVHIPLGDAKLVITTYWGLHTGERDWHLGQGVSIEWRKKRYSTQVDPDLADQLIHLHYFDCFSESAIRNTILGRIVSPRCEYQAGHNKVGSLQYLALAALIKPKQIKPPLPSVRKLTEDRWNKPQKTKGHRGSHTMNGH

SEQ ID NO: 3255 - protein, 227 aa, Homo sapiens
  source 1..227: note = ZNRF1 human full length Uniprot Q8ND25
MGGKQSTAARSRGPFPGVSTDDSAVPPPGGAPHFGHYRTGGGAMGLRSRSVSSVAGMGMDPSTAGGVPFGLYTPASRGTGDSERAPGGGGSASDSTYAHGNGYQETGGGHHRDGMLYLGSRASLADALPLHIAPRWFSSHSGFKCPICSKSVASDEMEMHFIMCLSKPRLSYNDDVLTKDAGECVICLEELLQGDTIARLPCLCIYHKSCIDSWFEVNRSCPEHPAD

SEQ ID NO: 3256 - protein, 429 aa, Homo sapiens
  source 1..429: note = ZNRF4 human full length Uniprot Q8WWF5
MPLCRPEHLMPRASRVPVAASLPLSHAVIPTQLPSRPGHRPPGRPRRCPKASCLPPPVGPSSTQTAKRVTMGWPRPGRALVAVKALLVLSLLQVPAQAVVRAVLEDNSSSVDFADLPALFGVPLAPEGIRGYLMEVKPANACHPIEAPRLGNRSLGAIVLIRRYDCTFDLKVLNAQRAGFEAAIVHNVHSDDLVSMTHVYEDLRGQIAIPSVFVSEAASQDLRVILGCNKSAHALLLPDDPPCHDLGCHPVLTVSWVLGCTLALVVSAFFVLNHLWLWAQACCSHRRPVKTSTCQKAQVRTFTWHNDLCAICLDEYEEGDQLKILPCSHTYHCKCIDPWFSQAPRRSCPVCKQSVAATEDSFDSTTYSFRDEDPSLPGHRPPIWAIQVQLRSRRLELLGRASPHCHCSTTSLEAEYTTVSSAPPEAPGQ
